United States Patent Application Publication US 2015/0175980 A1 - sequence listing, part 2

SEQ ID NO: 2041 - DNA, 2451 bp, Aureobasidium pullulans
atgaagtctgttctttcagtcaacgcattgttggcgttagcaggtcccgctgcggcttacacttcttggagctataccaatgtgtctgatccttattatggacagagtcctccagtgtatccttctcgtaagttacatcatgttctgaatatgcaagccgtcgctgacgttcgttcagcttccggcaatggatcaagcagtcctcaatgggccaatgcctatgctcaagcacgcaatctcttatctcagatgacacttgaggagaaggtcaatgtcacccgcggcttcactggcacctgtgtcggcaacaccggcgctgtaccccgtctcggtatcgagccaatgtgtcttgccgatgcacctgatggtattcgtggccaagagttcgtcagtgcctttcctgctggcattcacgttgccgcgaccttcgacaaggatctgctgtatgcgtatggtcgtgctttgggtgaggagtaccgtggtaagggcattaacattgctcttggacccgttgcaggtccgttgggaagagttgccagaggtggtcgtaattgggagggtctttcggccgaccctcacctcgctggtgcgggtatgggagccattaccagaggtatccaagatgttggcgtgatcgccactgcaaaagtatgtgtcacaacgggaagaagtgcagaaacgtgctgaccggttttcagcattggcttctgaacgaagaagaatttcgtcgcaacccagctgtcggagaaggtgaaggtaacccaccatcagtatcttgttctgtttgtcagatgctaacatagagcagcaatgtcgtccaacaccgacgataggacccttcatgagctctacgcctaccctttcatggactcgcttcgcgaaaacgttggcgctgtcatgtgcagttatcagcgcgccaacaactcatacggctgccagaattcgaagctgttgaatggtgttctcaaaaccgagctcggcttccaaggcttcgtcatgtctgattgggaggctcagcactctggtgtcgcgtctgcaaacgctggtcttgatttgatcatgcccgacggaggcttttggggcggcaatctcaccaatgctgtcaacaatggctcggtaactctcgatcgtctcgacgatatggtgactcgtcaattagcgtccttcttctacgtcggtcaaggcgacggttaccctgcagcagccgtgcacagtaatcttcaactccaggaacccgtcaacgtgcaagaagaccactcggatctgatcagagagattggggctgcaggaactgtgcttgtcaagaacgtgaacagcacgttgcccctcaagaatcctcgcttcttgtccatctacggatatgatgctaccataaaagcaaccccttggcagaacccatccagatacggcggtggctacgaagtcaacttcggctgggataccttcaacggcacgatgatcactggtggaggttcaggtggcagcacgcctccttatgtgatctcgcctttccaagccatccaggaacgcattgccaaagataagggcactcttcgctgggacttctactccgagaacccttccccaccctacgtcaacactgatgcctgcatcgttttcgtcaacgcctacgcatctgagagtttcgaccgcacaactttggctgacgagttcagcgataacttgatcaagaacgtcgccgcaaactgcacaaacactatcgttgtgaatcacagcgctggcatccgtgtcgtagattcctggatcgaccaccccaacatcacagccgtccttttcgccggtctccctggtcaggaatcaggtcactcgctaactgatatcctctacggcgatgtttcaccctccggccgtctgccctataccgtggccaaaaaggaagaggattatggcaatttgcttaattcgacgatttcctttgaccctcatcctcagtccaacttttcagagggtgtgtatatcgactaccgccacttcgaccgctacaacataactccccgcttcgagttcggctatggactttcctactcgaccttcaactattcgagattgcagacttctagacttgcaggtggagatttgtcaccttttcctgacgctgggattgcgatcatacaaggcggacaccctcagctctgggatgaactcttcgcagtctcgttagagattacgaataccggcgatgtgtttgcgaatgaggtaccgcaattgtatgtggggattgccgatgcgccaaagaagcaactgagagggtttgagagggtgccactgcagcccgggcagagcaagagggttaatctgccattgacgaggagggatcttagtgtgtgggatgtggtggctcagcagtggaagttgcaggctggggagtatgctgtctgggtcggagcgagtagtagggacatcaaattggaggggtcaatcactgtttga

SEQ ID NO: 2042 - DNA, 1182 bp, Aureobasidium pullulans
atgcagcaaactctcgctgccctcgctgctgttgcagctgtggctgttgcctcgcccattgagcccagagccaacatcaagttctctgtccctcaggtctctaccggcaacaccaaggtcgcagctcctcctctcgctctttccaaggccatccacaagtacaacggtactccccccactgtcgttcaggctgctgccgccgctgctcagcagagtggttccgtcactgccaactcttacaacggtgactctgagtacctctgccccgtctctgtcggtggcaccaccttgaacctcgacttcgacactggttcttctgatctctgggtcttctccactctccaggcttcttcccagagaaccggccacgccgtctacaacactgccaccggccgcaagctcactggcgagtcttggagaatcagctacggtgatggttctggtgcttctggccaggtctacgccgacaaggtcgttgtcggcggtgtcactgccacttcccaggctgttgaggctgccacctccatctccgctcagttccagcaggacactgacaacgatggtcttcttggacttgccttctcgtccatcaacaccgtcagccctgaccagcagaccaccttcttcgactcggtcaagagcactcttgctcgcaagctcttcaccgtcgacctcaagaagggtggccccggctcttacgacttcggttacattgacacctccaagtacactggtgccatcacttacgtccccgtaaacactgccaacggtttctggcaattcaccaccaccggctactctatcggcagcggtgccactgtttccagctcctactccgccattgctgacaccggcaccaccctcatgcttctccccgacgccattgtcaacgcctactacgccaaggtctctggtgccaagtacgacgacactcagggtggttacatcttctcctgctctgccactctccccagcttctccgccgtcattggtggcaagaagttcgtcgttcccggcagctacatcaactatgctcaggtcacctccactcagtgctacggtggtatccaatccaactctggcatcggcttctccattttcggtgacatcttcctcaaggctcagttcgttgtcttctccatggagaactcgactcctcagcttggtttcgcttctcagtaa

SEQ ID NO: 2043 - DNA, 1776 bp, Aureobasidium pullulans
atgcagaacattctactgatcgcagcgcttttgggtgcgcgacatgtacacagctttgttataccaacaaatggtgaagacccgggcttcgtcaaacacgaggagatctcagtattgccagaggattggtcattgtctcaccaagcttcggccgactcgatacttcacctgcgagttgcactttcgcatgcgcacaaaaactacatcgacatcgcagagcaagtcagcgatcctctctcagcacagtatgggctgtatttgagcgcacaagagctccaagcttcgcttcccgacaccaccatcctctcagaggcagttacggcatggctgtgtgagcacaacataaccgacgcgactgttgcacacgactggattgacttcagtacgactgtcggccaggccaattctctcctcaaagccaacttcagtacctacacacacaagaacagtgatcctgtactacgtacgcaacagtacagtctaccaatcgacatgtcaaaccacatcgacttcatctaccctacggtgcatttcttcgcgccaaagaagaatgctgatcatgcgcctcaactccaagcaagacaacacttcccaacaggaccagtgacctgctccgatggtacaagcacatgtcctcctctcctcaaatcaaaatacaacatcaattacgtaccaaaagacaatacttcaggcagtcaaatcgccattgctggttttctcgagcgatacccaaacatcaccgactggaagtcgttcctctccaaatacggactagccaagagcaatcctgccccttcttttactcccatctcaatcaacaatggtgtcaagtcattcactggtggtgacctcgctgtagagccaaatcttgatcttgattatgcaagtgtcttcactggcaagctgcctatcacatactattcggtcggtggtcgaccagctgagttgtcgcaaccagggaacaaaccagtgcccacagcaaagcttggcaatgagccttatcttgagttcttgcagtacgtgcttcagcagaaatcacccccacaagtcatctccatctcgtacagtgatgatgagcagactgtaccactggcatatgctcggaaagtctgcgatcttctcgcgcaggcagccgctcgtggaatctcggtgatcgggtcttctggcgacggcggtgcagcaggaaccggcacgaccagtacatgtgtcggacctgatggcaaacatcgctttgttcccaccttcccttcatcatgtccctggatcacaacagttggagcaacagcatcatatggtgggactgcctcatactcttcaggtggtatttccaactacttcgcccgcccctcctggcagacaaacgtcgtggccgggtatattaaagcactcaacggaagtcatgcaggtctctacaacaagactggccgaggcgtccctgatgtcagccttctgggtgacaactacctgacccttgagtctggttttgcaagcagatctagtggcacaagtgcttcggcaccagtctttgccgctatggtcgctttgatcaacgacatccgccttcgtgcgaaaaagccagtacttggattcctgaacccattgctctattccgacaaagcaaggacagtgtttcgcgatgttgctgacggaagtcaaggtagaggctgtagtgacggcagttggttcgagcctgggtgggaggtcttggctgggtgggatgccgcgacaggattgggagagccagactttgacaagttgcgtgctctgctttcttga

SEQ ID NO: 2044 - DNA, 1899 bp, Aureobasidium pullulans
atgccttccttcatctccgcagccgtcgctgccctgtcgctttcgagcctcgcctctgccaatgtggcataccgccgccaggagcaaggcttcaacagctctagcagcgcttccagccagctgtctacccgcgtccctgtgccaattggtaccggaagctccagcatcatcggcactagctccgctgtgagcagctccgttgctggtggtgtcaaccctggttcaaacagcaccgctactgccactggtggttcttctgctacccgcactggctccaacccttcggccaccgcctccggttctacccccgactctttgaccatcaacggagtcaccttctctctcgaggtcaacatcacctactctggtgttgagatcgaccttgccatccagctcaccaagagagccgatgagacccttcctcagtgccttaccacttgtgccgcaaacaccgagtgtgttggcaccgccttcaacaacaacaccgagacttgcaccttcttcagctccatcgatgccgcctcaagacgtgccgctcctggtgtcactttcgccaccgtcactggccgtgccaacaactccacttcttccgctgctggaaacggtacctcctccaccagaggtcctactttccctacctctactcgcaccaacaacggtacttccgtgaccgccacccccaacaaccctggcaccaacggcaccttccccaacgccgagtcgctcatctgccctacctacgatgatgaggtcctcctcaacaccgatggtagccagtacctcatccgttgcggtcttaacatcgacggtaccgtcatctctgtccgcaaggctcgcatgatcagacgccaggccactttcggtaacgactggatcgttgactgcattgacacctgctctgctcttggtaactgcgtcggtacctcgtacaactctgtccagggtacttgcactttctacagctctgttgacggtctcgttgccgatgccaacaccgattctgctatcctcgtcaacgaggctggcgatgttccctccgctactcccgttgtttctaccgtaacttccactgccaacggtgttcttactaccatcacaaccacccctatgaccacctcgaccgtctactccaccactacccgtaccatccagtcttgcgctcccggtgttccttgcgctggagctcagaccgttaccgaagtggttgtggcctacaccacagtctgccccgtctctgctgttcctactggtgtcgctaccggcggcgctggtgccaccatcaccaaggtctgcactgcatgcgcataccagcctactgtggtcaccgtctaccagtgccccaccgctcctggtgctcccggcgctggcaagcctaccgctgtcgccaccaagaccatctccgtccccgtccttaacggcccgactggcgccttgatgacctccactgtctaccagacccaggagcacgtcaccaccacctgtggcgccaacggatgcggcaaggctaccgttaccgccgtggtcagcctctacaccactgtctgccccgtcagctctggagcttctactcccgctgccagcaaccctggatcttcggcacctgctccttcatcatctgaggctgtctacgttcccggcactaccaagcccgccaccaccgagactcaccccgcctcgactgttcccggaaccaccaacgaggctaccaccgtccagccctccaccaaggctgctaccaccgagaccaagcccgccaccaccgtcaaggcttcttcttccatcgtccagtacaacccctcgagcaccacctccggtgttgttcagtacaccggtgctgccgtcaagaacggcatgggcttcgccgccgtcgccgccggtgttgctgccctcgtcctctaa

SEQ ID NO: 2045 - DNA, 1294 bp, Aureobasidium pullulans
atgtccaaattcacactacgctggggcattctcgccactggaggcatcgctgaggtagagaattgaggtctagcttgcgattgagtcgactgacaagtatcgcagagcttctcgagagacttgactgtcaaccccgagactcgcaatgtcaacgacatcaagcacgagattgttgctgctgccagttcaagcagtgccgaccgtgctagtcaattcttgaagaaggtcggcgcaccctcttcagcaaagggctacggatcttatgaagagctggttgccgacaaggacgttgacataatctacgtcgctacacctcactcgcaccactaccagaatgccatgctctgtcttgagggtggaaagaatgtcctctgcgagaaggctttcaccgtcaacgctgcgcaggcaaagaagctgtcagagaaggccaaggagaagaacttgttcttgatggaggctgtttggacaagatacttccccttgtccatctacgtccgcaacatcatcacttccggcaaggtaagtacgtccgctgccatccctgaactgcaatctctaacctgcacagattggaaaagtccaccgtaccttcgccgacctgtccattggcactttgcctgaggaggccttcgacaactcacaccgcatggtcaaccccgacttggctggaggtgctctcctcgacctgggcatctacgccttgacctgggtcttccagactctctaccacacccagcccgaatctgcacgtaaggcacctaccgtcgtttcatccctcaagaaataccccaccggcgccgacgagatgaccaccatgcttctcaccttccctcgttccgaagagctcggtggagatgctcacggtatcgccaccaccgctttccgcaccactcctgacccagacggtaagggcagcgctggccccgccatccgcgtccagggtgacaagggtgaaattcaagtcttccaccctgctttccgcccctccaagaccaagctcgttctcttcgacggcactgtagaggaaaagaccttcactcaacccggacctggcaagggctctggcttttacaacggcttcggcgacgacaagaaccccgagggcgagggtcacggtatgttctgggaagccgatgagtgcgcttttgctctcaaggagggtagaaaggagggcaagtacgagggtctgcaggagagcattgtcatcatggagaccatggatgaggtgcgcaagcagaacggtatgacctaccctgagaagattgagacgaccaaattccctactcagctgtaa

SEQ ID NO: 2046 - DNA, 1683 bp, Aureobasidium pullulans
atgttttcagtgttcactctgtttggccttgcactggtctttggacttgggtcgtgttatatccttggtctaggtttgagaccaaagaactacccgcccggtccccgtaccttaccattgattggtaatttgcaccaggtttgtgtcgtagccaagtctcgtcacaatagactaacagtaatccagatcccaagcaaaaatgaatatctgcagttcgccaaatgggcaaaggaatatggacctatctacagcattctggctggcagccgacctattattgttctttccagcgtcgaggtcgtcaaagacctactggacaaacggagcgctatctactctgatcgtcctgaggcatatgcagcaaatcacatcccaatcagcaagctacgaatggtctttatgccttacactcccttatggcgtaaagtccgcaagatcgcacactctctgttgagcatcaaggtcgtcaagaactacgacgcctatcaggagatggaacgtaaacagatgttggatgaaatgcttgagaatcctgtcgacttctttcctagcttgcagcgctatacgacgtctctggcagccacgattctcttcggctggagggcttcgtcaagtgcggatccaaggattcgaaaactcgacgatgagctagctgctttgcaggaagctatgagcacaggagctgctgcacttatcgatgggttccctttccttcgctacttaccggaggtacttctccctgccaaagcaaacatccgtcgcgcactccaacttggtcatgaagtgcatatggagaactggtacgctgtcaagaagaatatcgccaatgggactctcggaccctgtttgagcatcggtctcgccagagcccaggagaaagacgaaggtctcactgatgaagaagctgcatacacagtcggcaacatcttcgaaggcggcatggagactacctcatcaacattgtatgcttttatacaagctatgctgctcttccccgacgttcaagcaaaagctcaagaagagatcgaccgcgtcgtcggtgctaaacgtccaccagtcatggccgatgcagtcaatctgccatatgttagacgatgtgtcaaagagcttgtccgctggttccccgtcggacctttgggagccgtacctcatgcttgcaccagagacgacgagtacatgggctataagatccctaaaggtgcaccaataatcttgaacgcctgggctatcatgacagatcctgaacgctaccccgagcctcgccgtttcaaccctgatcgtttcagcgaagataatgacgacgtctccatggctgagatggccgcccacccagacccgagcaagagagacaccgttggtttcggagccggaagacgcatctgccctggcatgcatgtcgccgatcgaagcatgttcctcggtgtctctggcattctctgggccttttccatcacgccaaagcaagatgtccatggtagagatatcttgcctgatccagacaacctgatcgttggcggtattgctgctagacctgaacctttcgtagcgaacattctccctcgtgttggaaaagcagagattgtcaagcaagagtgggaggatgcacagaaactgctcgacccggagacaaaacagtggaaggagacaccagagggtgactgggatgtaactctgagagtctga

SEQ ID NO: 2047 - DNA, 1583 bp, Aureobasidium pullulans
atgcctcatatcctcgttaccggtgcttccggatttctaggcggagcagttctcacagcgatacaaaaagcacatccggattggacattgacgaatctggatctaagaccgcctccggtttctcaacctggagtcgcatatgtccaagcagatataacacagcaatcagaagtagatctcgctatacgtaaagccaatccggatgccattatcaatgtagccggctgggtgccaaacggcagtctacgatacagcaattcgaaagcactgcgaggcaaggtgttcgccatcaaccatcagggaaccttgaacgtgttatcagcagcccagaagacgaaatgcaaggcctttgtacaaacatccagctgcacggtagtatcagacgacctggaccatgaatacccaaacatgaccgaggacataccaatcggacatgccactctagcctacggagccagtaaagcacccgccgaactagccgttctagccgccaacactcccgcttttaaaacctgtgccttacggccagcaaccatcatcggtcctggagacacctacggcgttatcgcaacgatacacgcctgcatcgtgaaaggtgaaacaccatggataataggcacaggcgacaacatgtacgatttcgcctacataacaaacatcgccgacgcccatctcctcgctctcgataacctgctctcgacgaccccaatccctgcatcagcagcaggagaagcaatattcgtgtcaaaccaacaaccagtctatttccgcgacttcatgttggcgatatggaaagaattcgatcatgttccgcctttccagctcgtggtgccgacgcccttggcttgggttgccgggttggctgcggagatcaagacgtgggttactggggcaaaggcgagtacgttgagtagagggagtgtgagggatgcggtgggaacgagatacgccagcaatgagaaagctagacgggtgttgggatattatccacgagttgattttgtggatgcggtgaggttggcttgtgatgtgagtgttgagtttttattgtgttgagtgtatatgggagagctgacggatgtgtgttgacaggactacaaatgcattctggctgaaagggagaagatggtcaatgacaatggcgtcaaagctgattgaataccggttgcttggtctatcatagcagagcgtgattactagagctctgcgagacgcggtagatagcacagagctggcatctcctgagcgagaagaaatctgcatgtttcatcctagacgatgttaacatcttccctaccatacaccaaccactcagctcatcgagccgaacgaggaaagagcgacaaattgtgcgtgcgctttgtggccgctaaacttatcgcgttggtgtcgatcgcggaggtaagaagggccgtcgaggaaagtaatcacgtcggtgaaacatacatgtatttgcagtcaccggcgcatcgtctgggctcgtgggatggaaacgaagacttctttccgtgtggaagccttggagaggtggcgagatgtgggataagaagataggaagaaacggagaagaggaagaggaatag

SEQ ID NO: 2048 - DNA, 1050 bp, Aureobasidium pullulans
atggctagcattctgaaacgtgcatctttctctccagtcgtgaccggtgccgctctattggtactcctcaaaggtccccagaacatacaacgaccagtctatgactatctccaccaactattgaaacctcacaacatcgaacgcttgatcacaactttgaaatggctgttcgcatacggcctgatcaagaatgtcaatgaagccatcaaccaactcgcccgcaacaacttctccctccgctccagcaaagcagattgggactggaacaacgaaatcgccatagtcaccggcggctcctcaggcttcggcgccctcttctccaaagacctttcccaaaagggcatccacgtcgtcgccatcgacgtaaacccactcccctcccacctcgagaacaaccccaaaatctcctttttcaaatgcgatgtcaccgatgtcgaagccgtcaactccgtcgccgcagaaatcaaatccaaaatcgggcacccttctatcctcatcaataacgcaggaataggcggtcaacgtcccatcctccagaccaaaccggagcaattgaagaaactgatgggggtgaacttgttcgctcattactacctcgttcaagctttcctccccaatatgttggagaaccgcaaaggccatatcatttccatcgccagtatggcttccttcttcaccactcccggcatcacagattactcttgttccaaagctgcggttttggctttcaacgaaggcttgagtacggaattgaggactattcaccgttgtcctgagataaagactacagtcgtgcatcccttcttcgcggatacgcctatcattgctgctggaaaagccgagcttcaaaaagctggtgctaaaatcttggatccgcaggatatcagtgatgcggttgtggatcagatattgaatgcgaggagtgggcagattttgttgagtaatgggttcggacctgctatgagggcgtttagaggtctgccttggtggctccaagaagggttcaagagactcacggagagtgatctgtcgcattatctgaagaagtag

SEQ ID NO: 2049 - DNA, 2043 bp, Aureobasidium pullulans
atgatgccttttgtgtggttggcagccgccactttaattggtgtctacatttacagctactatcgttgcttcgcccgcaacctcgccgcagccaaacaatcgggtctgccctacgttgtagcaccagtctatgggttcaatcgtttctggctcgtaacacacaggctttggattccgttgttggagaaactccccaaatcttggacagatccgtggttacagtacgtccgcatctaggtcacactacagcaatgtatacctgtcatacggtgcagacatgagctgacccatttccaggttcctggatcctgaatggacttggctactgagacgcgagccattcaaggctatcggtagtgacatcttcattgtgtgctctccaggaaagaacgcattgttcgtagccgaccccgaggcaacaacacagatcgttacccgacgcaatgacttccccaagccaattgaaatctacggctctgtggatctctttggcaagaacgtagtgagtacagaaggctcgatctggcgccaccatcgcaagatcacttctccaccatttaccgagaagaacaatcatcttgtgtggcaggagagtctgcatcaggcacagagcatgatggcttctctggttggtaagaattccgagggcaagggcactgtgacagacatcgctgccgccactatgcggttgagtttgcatatcatcagtcgtgctggctttggcagacgtctgctgtggccgcatgaagaactcgaggagaatggccaagctggtgtggtaccggaaggtcacacaatgacctacaaggatgcattgagcacgctactggagaacatcatcgctgtgatgctgctccccaagtggtttcttggtaagcaattgtttgacaagtgtagcaaagcactcgaagctaactcaggcttgaagtaaactcacccatcaagcaaaataaggtcgcctacgaatctttcaccgagtggggcaagtatatgcgtgaaatgtaccttgagaagagggcggaggttcaagcaggcgagaagcgtgagggtatggaccttatgggagcgctcgtgagtggcgctggcatcaaaccggatcaagacccagagaaggccgacaaacaactcctcactgacgacgagattttgggaaatgctttcgtcttcatcctggcaggtcatgagaccacagcaaacacgctgcacttcgccatgctatacctggccatgaattggtctacgcaaaaacttctccaagacgatttggacgaaatctttggtgaccgatcgattgaccaatgggactacgagcaggatgttcccaagttatttggcggcatgtgtggtgcagtcatgaacgaggagcttcgtctgatcccccctgtcgtcggcattcccaaatgcacactcaaggactcacctcaaccactgacactttctggccgtcgtgttatcgtaccagaaggtaccgcagtaactctgatcacggtcgcctctcaccgcaacccgaaacactggcccaccctctgcggttcaaacgcctcagaggccgaagtcgaaaaagacctggcatcatggaaaccgcagagatggattttggacccttcaaagtcaaactcgacagcagcacaaaaacatgcacagcaaaatacacactccgattcggaagaggatatcggcggtcctcaatcctcggatacttcatctcatctcttcagccctgagcgtggagccttcatccccttttcagaaggctaccgcgcatgtctaggccgtcgtttcgctcaagtcgaggttctcgccgtactcgctgccatcttccgcgaatacagtgttgagctggacttggacaagtacgccagcgatgaggagcttgcagcaatgagcgaagcatcgaggagatcaacttgggacaaggccaagtctacagcggagaatctgctccagcacggcatgggaactatcatcacaattcagatgcgcacgggcaaggtgcctgtcaagtttgtcaagaggggaagtgagaagtacaagtacgattga

SEQ ID NO: 2050 - DNA, 1277 bp, Aureobasidium pullulans
atgcacatttctcttctgggggctgcgacctctctgctatacgtgagcgctagtgcattcactccggcctcaacttctggaacagacaagcttaacgaccatggcatgacaaaattgaagacttatctgcacaagaatcgtggtcagaactcttgcagcttggacaacgccgtcaaacgtcaagaatggtacgtctacacccgtaggctcgacaatgaagtgcgctgacgatgtctcccaggagctcgctatccaaatcaaacaagaagaagtacacggatgcagttttgtgtcttcaatcaaaaccagcaagaagtggaagcatcgctccaggtgcaaagtctcgctacgatgatttccttgcgactcacatcaatcaaacattgaccatccatggtactggaaacttcctcagctggcaccgttactacgtctacaccttcgaagaggctcttcgtaacgaatgtggttacaagggatatatcccttacgcaaactggggcaaatacgccgaagacttgctcaactctccaattttcgatggcagtgattactctatctctggaaatggcgagtacagaaaccacactggtgcttctatcccgagtgctgccactcctttcattcagttgcctgcaggctctggaggtggctgcgtgaccaccggcccattcaaaaatatgaccgtcaatctcggccctctcgcacctgtctttgacgacataaccccaaatcctcgtcctgacgggctgggctacaaccctcgctgtctccgccgcgatgttggtgtatacgctgccagtatcgcctcgacagacgccaacagcaccgatctgatcagagaaaatacctacatcggcgatttccagacaaccatgcaaggcgatttcgcaggagggcttctcggagtgcacacagcaggccacttttgggctggaggagatcccgcaagtcaatgagaccgattgacatgtcaaatagctaactgtgaaaaatagggagccgatatcttctcttctcctggtgacccatggttctggctccatcacgcccaaatcgaccgcacctggtggatttggcagaaccaggatcctgctagcagaagcagtgtcaagggcaacaactcactggctggcaccaccacactgaacaacagtccaccttctaggaacactagattggacgatgtcattgatttgggtgtcaatgctgagagtatcttgattagggatgcacttagcacgaccgccggaccattctgttatgtttatgtttga

SEQ ID NO: 2051 - DNA, 1857 bp, Aureobasidium pullulans
atgctgtccctaccaatcattctttcattcaccacttcactggccgccgctgctggtctgtctgatgcttcgttgaagaactacgtcaactcgcttgagcttgattatagcttcaaccctgtcaaggaagcatactggacaagcctgcctcaccatcgcagaacaccttttgcactctctcccgacggcagccgtgctttccttgcctacctggacaacagcgagactgatgtccacatccagcgtgttgacccgaagaccttcgctgctgtcggcagtgctgtcaccgtcaagggaggaaaggaagctggtggactcgttgctcacaacgatggctttgctttgttgaccaatgaggcacttccctctggcacttccaacgctcctgccgacagcactcccgttcctgttctctacagatataccgaaggagagcagaccttcaagactttcttgggtggccccggtgtccacgaaagcgacggtctttccgcatcgcctgacctgaacggcgatctcgtctactccgagaaggctggcctgtacggtgcctattttgttgtcacagactacagcggctgggctgaaggtcactttggtgactcggttcaatatatttccaccaatggttctctcgagaccctgcctgagtccagcgcatggggttgctctcacaacacgggtatcgccttcgaggctgccgacgctgttccattcgccagcatttgtgccgaggatcagggtgacatctggctcaacacgaacaaccgaggtatggacctttcgggcaccaaaatctcgaacgagaataccacaaacggtgctggcggtgagtccatgggtggcatgtctggttcttacagcaatctcgcacgctaccaaggcgaggattcgtacatcttctcctgggtctctcgcggtgccgtcgacctctacgagaacagctggatgggcaagggttatgtcgcttccgccaacagaaccaacggtcgtaatgtggccatcgcaaccttttctgacaagcagaccatggatggcgagcaggcttcttcagtcgttggagccaaagatggtgactcgcaagtcaactggatcacttcgggcactgctgactgctccaacgcgcacgttgctacttttgatggtgccaatgctctcgtgacctgggagcagatcgatgagcctcagtgcaacaacattgctatgggttgccagggagagttcagcggatcctacttccagctggttaacaagggcagcaaagttggcgagcccttgaagttgatggatacctacgtcgctggcgacatggttactatggacgacggtcgcatctgctggccttatgtcaacatgacttggagacttgaccaggctgccggttcatacggcggtctcccttcttcgaccaccaagcagatctcatttgcttgtatgagctctggaaatgatacttcatcttcgagcgcggtcgcttcttcaactgctgtttcgagtgccatctcttcttcaagtgccgttagtcccagcactgttgcctcgactcaggtagaggtaaccgccgctaccgtcagcacctcatcttccgcggtcgcatccaagatcccagcctccttccctgtcgtcagctcatcaagcaccatcgcctcgtccatctctagcgtcaagatcgccaaaatagcacactcgagcacatcttctctcgccacctctgtgtctgcttccgcgaccactttctcgactcatgtcagagcatcttctacttcgagtgtcgcagctaaggaggcccctactgcattggctgatgccgccgagaacaagggcgaggattgcaaagtccagtacatctacgagtag

SEQ ID NO: 2052 - DNA, 1042 bp, Aureobasidium pullulans
atgatgcatttgttctcgtccttgtcattggcagcaagtgctttggctgcagttgctgtccaagaaccaacccatgaccaagtccctcttggaccttcaacccttttccagatcccgactctaggctttggcacctggaatctgaaggagaatgctaccgaggccgtctcttacgccatcagtactggatatagacacatagatgctgcagcgatatatggaaacgaggtaaatatgatccgcgtgcctttagcgaacacttcataacaacacacagaaagctgtcggcaaaggcatcaccgagggcttggagaaagccgggttgactcgtgatgatctatgggtgacctccaagctctggaatgaccatcatgctcctggcaaggtagaagcggccatcgacaagaccctgtctgacctcaacctcgaatatcttgatctgtaccatatgcactggcctgttgcttctaccagaaagggaaacgaaatatccttcctcgacacctggaaggcaatggtgcagttggttcagtcaggaaagactagacgaattggtgtctccaatttctcgcccaaccaactcgacactttgttgaaccatacaacccacgttccgtttgcccaccaaatggagctccatccttaccttcctcagaacgactggatccagtaccacaaagttcgtaacatccgcgtaaccgcctactcgcctcttggaggaacaaatcccacctatcatcaaaagtcaaaacacatgccgactccgttgctggagaccgaggtgctcatcaaaatagcaaacaagcacaatgccaccgctgcacaaatctcactggcctggggtatgagccgaggaaccagcgtcatacccaagagtgcacatgcagcaagaatggatgagaatctttccagtaagcacgtcgaacttgacgccgatgatttggagactattgatcaactgggtcgtgactttaccttcagatacaacgaccctagcaaaagctggagagtcaagttatacgaaggccttgagggcgtgtga

SEQ ID NO: 2053 - DNA, 2144 bp, Aureobasidium pullulans
atggcgcaactcgatactctcgacattgtcgttctggccgccctgctcctgggcaccgtcgcctacttcaccaagggtacctactgggccgtcgccaaagacccctatgccggctctctcgcaaacggtgccgccgcgaaggctggcaagactcgggatattattgaaaagatggacgagtcgggcaagaactgcgtcatcttctacggctcgcagaccggcaccgctgaggattatgcctcgcgtctggcaaaagagggttcttctcgtttcggtctcaagaccatgacggctgatctcgaggagtacgactttgagaacctcgattctttccccgaagacaaggtcgccatgtttgtcctggccacatacggtgagggcgagcctaccgacaacgctgtcgaattctacgagttcatcagcagcgaagacgtctctttcaaccagggaggtggtatttccgagaagcctctggctaatctaaagtacgtcgccttcggtctcggcaacaatacctacgaacactacaactcaatggtccgcaacgtcaccaagttccttgacagactcggtgccaacagaatcggtgcagctggtgagggtgatgatggtgccggcaccatggaagaagatttcttggcctggaaagaacccatgtggaaggatctggccgattccatgggcttgcaggagcgcgaagccgtctacgagcctgtgcttgaagtcagtgagaagcctgaaatggatgccgagtcggatgatgtctatctgggagagcccaacaagaaccatcttgaaggcaagcaaaagggtccattcaatgcccacaacccttacattgcgcctatcgttgaatcaaaggaactcttcactgtcaaggacagaaactgtctacatatggaaatcgacattagcggctcaaacttgtcctacaccactggcgaccacattgctgtttggcctaccaacgccggcaaggaggttgaccgtttcatggacatccttggtcttgatgagaagcgccacatggtcatctctgtcaagggtttggatgccacggccaagatccctttcccgtcgcccaccacgtacgatgccgttgttcgctaccacatggaaatttgcgcccccatctcgagacagttcgtttcggctctcgcccccttctcgcctaacgacagcatcaaagccgaaatgaccaagatgggaagcgacaaggattatttccatgagcaggttgccgctcgcaattacaacttggctcaacttctcgaattcttgtctcaaggtcagaagtggaacaaggttcctttcaccatcttcatcgagggccttcacaaaattcaaccccgctactactctatctcatcctcttccttggtgcaaaagaacaagatctcaatcaccgccgttgtcgaatctgtggaaactccaggagcctctcatatgctcaagggtgtcactactaactacctgctggctcttaagcagaagcagcacggtgacccttctcctgaccctcatggattgaactacgcaatcactggtcctagaaacaagtacgacggtattcacgtgccggtgcacgttcgccactccaacttcaagctcccttcggatccttcgaagcccatcatcatggttggcccgggtactggagtcgctcctttccgtgggttcgttcaagaacgtgccaagcaagcacgtgatggagaggcaatcggtaaaaccatgcttttctttggttgcagaaagaaggcagaggactttatctacgcagatgaatgggaggtacgtaaagcaaaagtcttatctgaaaagcacaaagtcaactgaccgttacacaggcgtacaagaacgatatgggcgacagcttcgagatgttgaccgccttctcccgtgatggtgctcaaaaggtctatgtgcagcatcttctcaagcagcgcgccgccgaaatcgacagacttctgcagcaaaaggcttacttctatgtatgtggtgatgcagcgaacatggctcgtgaggtaaatactgccctgtcgcaaatcatctccgaacaaagagggattccagagtccaaagcggaggacattgtcaaggctatgcgcaacagcaatgcctaccaagaagatgtctggtcatga

SEQ ID NO: 2054 - DNA, 588 bp, Aureobasidium pullulans
atgaagttcacaaacaccatcgccctcctggcctctgcttcttcagccatagcagcacccctcgaagcccgccacaacccagccaaacccttcgaactcgacatctccttcagcaactcccccctcaacggccccatccaagcctccgacggctccttgtggatcggcaaaaaagcctcaacctcatgcccctccaacatttccccctgccctcccggcaccaacacatccttcacctcctccggcgacggcaaactcttcctcaatgccgaagtgccaggtggacagcaagtgtacatccgacccgatggactcctaacctacaccatccctcattccgccgccatgcccgccggttctcagatcagtggatttgaaatctcgtcgttgaatcaggttggcaagttttatgattattggttgtgtagtgaggatgctacggacaaggcttatcgtatttggttggagtatagagatgagaatggagcggtcaagcagaatgggtttacggggaaaaatgcatgtacgatggtcagtttgttggctaaggatgtcaaggagggatttgctgcttgggagtataactag

SEQ ID NO: 2055 - DNA, 1073 bp, Aureobasidium pullulans
atgcctttcaactataacaaagtactcgttcttggtgccacttctggtatcggctgggctctcgcaagcaagctggtccagaatggcacctcggtcattgttactggccgccgacaggagaagctggacgatttcgtgtctcaacatggcaaagagaaggccgaggcagtacaattcgacatcacgcagctggacaagattcctgggttcgtcaaggacatcatggagtcccacccagacattgacagcatcttcctcaactccggcattcagagaggattcgacttctcaaagcccgagagcattgatctcagctctgtctcggaagaaatgaacacaaactacatctcctacatccatctagtcaccgccttcaccccttatcttcaaaagcagagcaagcagacttccttcatcttcaccacatctggattagcattggtaagtaattaattgccgcctttccttcaatatcatgtttcgagcatgagtagcttctttcgttagtgttgcgacaaacgaagacgctctcggtctgtcgatgaaggtaccttgacaatcaattggtgtccaacactgtcaatcctcttaggaagattcgatcgatcatagcattgcgctgtggcaattattcgacttaaacatggttgcgaatgagaaggcaggggagctccattcataacaattcgctgacaaacatccgatagattcctatgatgagatgccctaactactgtgcttccaaggcggcactgcatcacttcattctggtgctccgagagcagctcaagaacggacctggtaacatccaggttatcgagatcttccctcccgccgtacagaccgagctgcatgacgaaaaacaccaaccggacatcaagaacggcggacagatcggcatgcctctcaaagactttacggaagcaacgtgggctgggctcgaggcaggcaaggaccagattccggttggcatgtcggagggctccttcaacgggtgggaacaggagaggcagaaggcattccacggtatgaatgcacacattgcaaagatgatggcacagcattcgcagtag

SEQ ID NO: 2056 - DNA, 2161 bp, Aureobasidium pullulans
atggccctcatatcaatcatcgcggtggtagtcgtcgttgctgtcgtgtcattcatcaattatctgaacaacagcaagaagaaccaactaccggcaggagtacaaagactgccaggcccaaaaggttggtctatgaatcatacagtcagtctgatgagctataactgacgaatacaggctatccaattctcggcagtgtaccagacgtgccagacaagaacagtttcctcaagttccacgaatggggccaacagtatggtcctatctaccaagtcaaccttgccggccataaccatgtctggattacgcgagacagtgttgcccaagaaatcctcggcaagcgcgctgccaacaactccgagcgtcctttcattccatctctgcaagccgacaatcgtaacagcggtcactatcttcctctgatgtctcgaaacggtatgtgatatataagaagagtccgaccaatttgctaacacatatctcagaactatggacaagacagagaaagttcgcgaagcagatcatggacaagtcatcagcgaatgctttttacaactaccctgaactcgagtctgttcgccttctcttcgaattgatgacagatccatctcgatacaaccatgcgctggaatctttcatctcaagagtcacttgcaggctgggatggggcactgcagctccgtccgatgagctcaaacagcgagctagagagttgctcataggtgtctcacctaacggcgcgttgaccaacaaactcggtttcctcaaaaagcttcccgaagctatcgtcccagcaaaagcttgggagtttcgcagatacagaaccgagtctcgcttcttcaccatactgcagaacgaagttagggagaagctcaagagcaagactgctccagagtcttggatgcgtcatttccttgagaacaaaactgcgactggcttcgcgtctgatctcgaaggcgcttatgctgtcggtatgcatggcattgctggagctctgacaatcgctgcgcccatgcaaagcttctgtctcgccatgtgccatcatccacagtaccagtcgatacttcacgaggagatcgaccgagtctgtggcgatagattgccgaagctcagtgatatgccaaacatgcctgtgctaagagccttcatcagagagacactgcgctggcgtcctcctgtcccgactggcattcctcacgagtctgtgaaggacgatatctacgaaggctacttgattcctgctggttccgtcatgcaccctctcgaatggtctattagtcgtgatccagaagtttttcccgagcccgatgcattcaacccaatgcgttggttggagaccaagtacccaacctaccaagaacctctgaccaaatatcctactatcacccagtacagtcagttcggttatggacgtcgcatctgtgcaggcatgggtgtcgccgaagctgatctctttgtcggtattggcagtttggcatggatgttctctctcagtgccagcgacgccgaagccgagaaagccgcagaattacccaaagaacccgttccgtcatcattgccagtccacaaagaagccaagaaagcaacatcactaccatcaggcatgcaaacacctccatcagagactgagattgaagaacaactcgacgaacacttttcagaaaaaatgctgccagcagacacctctatgctctcccgcaagaagaccgtcaagaaaccaaagaatctcgaggctggcggcggtctgagcagagcaaagactgtgacttacaaactccgcctaccaggctcatcactaccaggtcaattccccgctttcttcgaacaacacaccggccccgacacaccaccctcatcaccaaaagcccgcaccgcaatggcaggaacaccagacatgccagccgtcgacaacatgttcaacagcgccgccgacgaaaaggcctcaaaaccagatcctacacttgaatactcgagtttgttgattgctaaacccctgccgttcaaattcaacatgaagatcaggaataagaagaaggctgaatatgtcgcgagagaatggatgttttacaagatggatggcgagtttgaggattcgaagtgttattgggaaggtgggaatgctggaaacaagatgtatgggtggggtgaggtgcacaaatga

SEQ ID NO: 2057 - DNA, 1242 bp, Aureobasidium pullulans
atgaagagcactatcattctttccgccttttctttggcttctcttggctctgctgcggtccatggagagcgtggctttggtctccaacgccatcaggctctgcatagcagtagcagtagcaaaggcagcacggtcaccgtgaaggctacgtctagcagcatcaagacttcgactcgacccacgacatccgtgaagagctctatcagctcagtcaagaccagctcaaaatcttcctccaaggtctcatcatcgagcaagatcccatcatcaagcaaggtctcgtcatcgagcaaggcctcatcatcggtcaaggtatcatcatcaagcaaagccgtcagcagctcggtaaagtcagcctccaagtgctcagcttcagccaaagcatcgagcacattgaccaaacgcgcaactgcaagctcgacgacactgagtcttgcctggaaagctggtctttccggttaccctggcatcgagaccctcgacatgttcaagcaacaatgggtcccatacatctcctggtacagcaactacgagcctgttgcaccaaacattcaagcttccgatcacaccgtcgttggtgcacctatgctctggggcaagggtgatcaatgcctcacaaacaaccccgatggcccagtcgacaagtggagactcggaaacttcaccgagtacgtgacaagcggcgagacaaacccgaatgtcttcttcggcttctacgagcccgattgcgactgcccgtcttccagccacatcaccgacgtcaacgtcggtgttcaaaagtggaacgaattgatcaagcctctccgcaaccgtggcatcgcactcggctcaccacctatgtgcacacagctcgatcaatcatggttgaccaacttcgccgcccagggcgtcacctgggacatcactagtatccacgtcaacaagcctaccgtcgcagaaggcatcaaggtcgttgaatactacgtctccaagtttggcaagcccgtctgggtcagcgagttcacctgcgtcaatgatcagaactggagttcgtgtggtgatcaagctactgttaatgctttcatcgacggtatggtcaagtactttgaaggcaatgacatggttcttgcatatggtgcgaacaatggagagggtgtccctggtgtctggaacttgatgaccagctcttggcctcctcagcttactgctactggtctgcactaccagtctgttttgaagactcttgctagccaacagtgctaa

SEQ ID NO: 2058 - DNA, 1557 bp, Aureobasidium pullulans
atggatgctatgctgccgtctctcggaagctccaagtaagaatctcgagctcaggcctcacagctcttgtcaaagagtggacacatgctaactctgccacaggaaggctctccttcttggagctggtttcgtcacccgccctactgctgagatcttgagcgacgccgacatctcggtcactgttggtatctacgcacctcctacgcatcgtcccgtacacgacagtcattgacatgccattccagcctgccgtaccctcgagtcggccaagaagctctgtgagggcctcaagaactgcagccccatctctctcgatgtcaacgactcggctgccctcgagcacgaggttggcaagaacggcgttgtcatcagtttgattccctacacctaccacgccaccgtcatcaaggctgccatcaaccagaagaagcacgttgtcaccacctcatacgtgagtcaaccccacatctctcgttgtgtccgctcctctaactcgtccaggtctctcctgccatgctcgagctcgacgccgaggccaaggaggccggcatcaccgtcatgaacgagatcggtcttgaccccggtatcgaccacctgtacgccgtcaagaccatcgacgaggttcacaaggccggtggcaagatcaccagcttcctcagctactgtggtggtctgcccgctcccgagtgcagtgacaatcctctcggctacaagttctcatggagcagccgtggtgtccttcttgccctccgcaaccaggccaagtacttccaggatgacaagatcgtcgaagttgctggccccgagctcatggctactgctaagccctacttcatctaccccggctacgccttcgtcgcctaccccaaccgtgactcgaccccttacagagagcgctacgctatccccgaggctgagaccatcatccgtggtacccttcgttaccagggcttccccgagttcatcaaggcccttgtcgacatgggcttcttggaagacgccgagaaggagttcctcaagcctcttgccgacgctcctaccctcacgtggaaggaggctactgcccaggttctgggcagcagcggccacaccgaggaggacctcgtctgggccattagctccaagaccagcttcgccgacaacgagcagaagcaccgtatcatcaacggtcttaagtggatcggtctcttctcggatgagaagattgagccccgcggcaaccctctcgacaccctctgcgccaccctcgagaagaagatgcagtacgaagagggcgagcgtgatcttgtcatgctccagcaccgcttcggcatcacccacgccaacggtgccaaggagactcgcacctctaccctggtcgagtacggtgaccccaagggctacagcgccatggccaagctcgtcggtgtcccttgtgccgtcgccgttcagcaggtccttgacggcaagattacacagaagggtgtccttgctcccatgagccccgagatcgttgagcctttgagactcgagctcaaggagaagtacggcattgagatgaaggagaagactctgtaa

SEQ ID NO: 2059 - DNA, 1865 bp, Aureobasidium pullulans
atgcattcgcccttctggactatctcgactgcagcagtctgtgtggctgtcgctcaagcgtcatctcttgaagatgtttgcacttcagcttatgcagtcgccgctttacctgctgcaaacttctatcaaggcattaccattgacaatgcatctgtgactgccaatccagtttacgccgccaatgccagcggtaatgtcatgtttccggactctacttttgattactgcaatatcagcttctcttactctcatgatggaattgagggtgataatgtgaggttggtttattggttgccttcgcccgataacttcaaggatcgctttttgtctacgggtggtggtggttacctcagtatgttcgggccgaatcgctgctgttgatcagtttactgacacctggatagtctcttctggcgatggcttatctggctcgcttcctggaggcatcgtctacggtgctgctgctggtaccactgatgccggatttggcagcttgtctacccaattcagcagtgtcttccttctcgccaatggcaccgcgaactttcacaacttgaacatgtttggatttcaagctatccatgagatgacggtgctgggtaaggagtttaccaagggcttcttcaacatgaccaaggacgacaaactatacgcttactaccaaggtcagcaagaatacacatttgtctgcaagaagtgaccactgacactccacaggttgttcagaaggtggtcgcgatggctggagccagatccaacgctacggagatcaattcgatggcgccgtcgtcggtgcccctgctttccgcttcgctttccaacaagtccaacacgcatactccgacatcgtggagcaaacactagagtactatcctcctccttgcgagatggaaaaaatactcaacgaaacaatcaccgcttgcgacccgttggatggaaaaaccgatggcgtggtcgcccgtaccgatctttgcaaattgcacttcaacactagtagcttgattggcacaccatactcatgcgctgcttctcctgtgtatatgggattcccacctcatcctgcttggccggcgcaaaatggcactgtcacggcaaaggcggtgcaggtggctgataccattatccaaggcctgcgcgactctcacggcaaacaggcctatctatcctaccaacccgcctccatcttcgcagacgcattcacccaatacgacaccaacacatcctcattcaccctctggcccagcgatttcgccgcacagttcgtcttacccttcttggacttggtcaacgcaacttcctttgcaaatctggataatgtcacctatgatacgctgaaacaatggatgtacgaaggctggcaaatgtacgaatccactctccacaccacctggccagacctttcctctttccactcttccggcggcaaaatcttacactatcatggcgaatctgatttttccatccctactggaagttcggtacattatcgcgattcggtgcgggagatcatgtatcctcatctctccttcaacgcttccaatgcagcgctcaatgagtggtatagactttttctcatccccggagccgggcattgtggattgaatgcttatcaacccaaccatccattcccacaaactaatctgcaggtcatgattgagtgggtggaaaaagagattgtgccgcagactttgaatgcgacggtcttgcaaggagagaggaagggagagaacgagcaagtgtgtgcttggcctttgagaccatcttggagtaagagtggtaatgggactgtggagtgtaggttcgacagcaagagtttggagacttgggaggtggagtttgatgctttcaagatgcctgtgtactga

SEQ ID NO: 2060 - DNA, 1434 bp, Aureobasidium pullulans
atgaagatatactttcttttaccctctattctcgttgcaggcgcactcatgacaggctttgcccgtgctgtcaatggtgtgtggagattcctttagagtaatgctcgctcgcattgtatagcacgtctcagtgcttgcggccagcagcatgcctcatgctatcacctcggaatctttgctgacttgtgcgctcgactgtcagaacacaaccatccacgctgcgagtgtggctacacaatcaacgctaccagctcttcaagtcccttcgccctcttcaccgacctcctggaaaccgacttcctacatctttacaacctacctgacagtattgatgtacccgcctcggatgccgttggttgggccgtacaagcatacaatatctcacccttagtcgccagaggtcccttcggtaaagctgctgagatcgacaatgttgtcctaaacccactatctaggcgtaaagactggactggcaatggaacgctgggcggcgcccctggtcttcaggtctgggtcagaaatcagcaagatctacttggacccgtcggtgaccagatggttcggaccggcgaaatcaacagtctacgccgggacatgcgatatgggagcttcagagttgccatgaagatgagcgatgttccgggcacctgtgccgcgttcttctgggtgcgttcgtccactcattcagtgagcatgacttttggctgacatgcacgatagtaccgcaatgactcacaggaaatcgacatggaatatctcagccgacaagccaattacgagtccgccaacggcttatctcccataaatctcgtcatccaatcgccagcctctgcgagtgcaaactacaacgccatcaacacaagcacttaccgcctcgagactctgccctttcaacccagcgaaggctatcacgagtatcgcttcgactggacaccagaacgcatcgttttcttcgccgacggtaaaccactctcagagttcgagaacgctttcgacggcgatgctcccgatgctcccggaactatgatgttaaatcactggtccacaggcaatgctggttggagcggtggtccaccagctcaagatgctgtccttacagtcagctacgtgaaggcctacttcaactcgagtaacgcaacacgagagagccaatggaatgctgcttgcggaggcgaggtctggcgcaatcgcacttgccaaattccagactatcctactcagggcattgacccacaacgcatgggaatgaaggacccaggcaagagttacttcttcatgtatgatgaatactgcaccgtcaaccaaacgctgtacccagctgccactggcggaccaagcaaatcgaatggtgcttctcctctactgtcgacgccggaaacgtggacgatactcggctggacggcgatattcggcctatttctgcttgctagttga

SEQ ID NO: 2061 - DNA, 1127 bp, Aureobasidium pullulans
atgaaatccttcttcgtttccgctgctcttgttgctgcagcagatgcacttgttgctcgcgactctccatggtatgtggatcctatgaccgacttcatacattcttctaataactcaatttctagctgcttccatttgactgcctctggtggtcctggtggcgttgtcggtcagctctctgatggtcagaaccgcattggacaaggtacctatgctgaagctgttttcttgtatctttccttactgatgtcttcccacaggcttacccggtgctcaatattgcattgactccaagggtgggctcactgatggcaatggtcgtggctgcattttgacacctcctacaactcagttccagtgtgaccagggtgccagccccacggatggattttccgtcggttgtgatggcaagctctcaatcaaaggcaacactgacttcaagtcttgcccaactggtgacaacggaggatacaacatttacaccactgccccagctggtcaaggtggctgcgtctccgtcaccttgagtgcggataactgcaaatccggctgccctgctccagctcccgcaccagcccctactcccaagacttgtcctgctgctctgactggtgcctacgagtaccctcatctcattgtcccggtcgactctaagcaggcagacaaggcgttcggtacttcttacaacggtactatcactagctctgtatcgagcttgttcaacttcgatatccccagctctgattccggaaagacctgttctttggtcttcttgttccccgagcagaagaatcttgagacttcttcgttcgacttctctggcgctgggggtgtcgacttcacaatgctgaaaggcactgccagctccagcaccacgtacaacaacaagcctggcgttgccactgattacggtgtgaccaaggtttcccctggcacgtcgtcggtggttgcaacattcgcctgcccagccgggtctgctatcggtttcggattgtctgcatcggacggtaccatgctttcgtatttccaggactacaacccgtctccgtgagttttgctaatatcctctgctatcaacgtctagctaataatatcttagcatcggtctttacatcaccaagtgctaa

SEQ ID NO: 2062 - DNA, 1835 bp, Aureobasidium pullulans
atgtcttcttccaacccatcaaggcatttcgccttcgccttgctcatccctctggtgctggcagcagcaaattacgcttctctacaccaacaagtcttgggatttctcggctaccactctaccatctcttctctacctactgttaatatacctcaaactactctggttggcacaatcatcgataacgccttcccaacaccagtggaagcatttcttgggtttccctacgcagccgctccaactggtgctttgagattcgccaaacctgttgccatacagcctggaaatgggaccttcaaagccgatacttttggtcccagatgtcctggaaaacaactacttcctcctggtggcggcgaagatatttggtctgaagattgcttgaccgccaatattttccgccctacctctttgctcaaggacaaaaaagtacccgttatggtttatatccacggaggagcttttaatcgcggtacggcgaagatgcataatacggcttctatggttggatttgcgactgaggctttcgttgccgtcagcttcaattataggattggtgcccttggctttctgaactcgaaagttacggaaaaggagggagtgttgaatttggggttgcatgatcaggtgctcatgttggagtgggtgagggataatatcgcggcctttggaggtgatgagggggatgttacgttggttgggttgagcgctggtgcacactcggtgagttccatccattttgactctcgtcagcattggcggttatgatgttgtgatgaagggagaaaggttactgatgcaaggaacagattggccatcacatcatgaacatcaactccccccatcaatatcccctcttccacaaagcggtaatcgagtccggtggccccacctctcgcgcccttcacccttacgactctgccctgcatgaagaacaattccagatgttcctcactctgacctcctgctctgatctctctgacaccgcgatcatcccttgtctccgcaatgcctccgaagcaagtatagtggaagcttcaaacaaagtatttgctcgttggaacccttccgtcagatgggcatggcaacccgtcatcgacaacaacttaatctcccgacgccccctatcagcctggaagtcaggaaactacgccaacgtgcccattctcactggcttcaaccacaatgaaggaacaatgtatgtacccaagaccaccgccacatccgcgcaattccgcaatttttgggccgaactgcttccgcatctgggcaaggaggagttgggtattatcgaacaactctatcctgatcctgctgtatatcctcattccgaatatctcgataccagaggtttggatgtcggcgcgcagtataaacgcttggaagccgcatatggccattacgcatacgtatgccctgtgcgtcaaaccgcgaacctgtccaaaacaccaatgtatctataccactgggccaccaaccgcaccgtcctcggcggcgccaaccacggcgatcaaatgtggtatgagaccttcgatccatccaccacttccgtctcttccacgcacgaagaactcgctggcatgtttcatgattacattgtcagttttgttttgaccggggatccgaatgccgtggaggggaggtggaagcgaccggtttgggaagtgtggggtaagggaggagggcaagggcacaagaccatggtatttggcgccggtaatgatgagcgtgctggtggaaagggtaagggtgttgtagcggaattgctcaatgatacctggggctccaaacaatgcgaattctggtggtcgcaaacccctaatgtggaagattag

SEQ ID NO: 2063 - DNA, 1113 bp, Aureobasidium pullulans
atgccttccttcagcaccatctccgccgctgccgttctggctttcgctggcatgtcctctgccattccccagtacaacttcggtaacggtactgcctcggctgttgcctctggccgccccatgaccagctccgtctctggccgtcctatgactacctctgctggccgtcccagtgccaacagcacctcttctgctgttgccggccgtcctagctcgaacgccaccacccctgcccttgacggcaagttctgccctggcctcgacctttctctctacatcgacaacagcggtgctactttcagaatcgagtgcgacaccaaccacttcggtaccatcatcgacatccaggtcaacatcaccagacgtgctgttccttccagccttgatgactgcttgaacctctgcgatgccaccgccacctgtgtcggcactgctttcgacaccaacgctcgtacttgcactctctacagcgatgttcaggctgcttacgatgctgccggcatccagttcgcccagcgcgtcgctgccggtactggcaacaacggtggaaatggcggtaacggcaacggcatgaccaccattcctgccggcggtgtcgcaacctcgaccatctactctaccaacgtggtcaccatctcttcgtgcgctcctactgtcaccaactgccctctcaagaacggccagaacgcagtcgttacccagatcatccccgttgcttctaccacctacgtctgccccgcccagaccaccctgcctgttgctcccattgcttgcactagctgcccttacaccgtttccaccgccactgtctactctgccaccggtggcaacatggtccccgtcagcactcaggtctacgctgctccttgccccactggtaccgtcgttgttgagaaggtctgcactgcctgcgctgccatgacctctactgtccctgccggcaacacccagaccgtcactgcctgcaacggtgctaactgccctgctacctccaccatggccaagtacacccctactacttccggtatggtcatgtacactggtgctgcttccaacgtcaaggctggtatgggcttcgccgccatggtcgctggtgccgccctcgtcctctaa

SEQ ID NO: 2064 - DNA, 1448 bp, Aureobasidium pullulans
atgtcatccatcgcccttcttgccctgctcggcactgtggcctcagcagccaaggtctgcaccaatgtcactgtcccagtctacatcaacgccagacaggccgtcttcaatgttcctacccttgagtcgaaccttgatgccaccactttcgccctcaacttcaccaacattggcatgaacttcaccgatgttgtcactactggcttccaaaccgtcactggacactacaacatcagcgccaaatactgcaagcctcagggggacaacaaggccaaccccgttgtacaagtcttgacacacggtattggtttcgacaagagctactgggacttgtcatacgacaactacgcctactcttatgttgacgtggctgttgctgctggttaccacactgtctcaattgacagatttggaattggcaactcatctcacgccgatcctctcaacatcgttcaggcccccgctgaggtttctgccctgcacgagatcaccacaatgctccgtaacggtaccttcccttcggtcagccacaagtttggcaaggttgtacacggtaagcatcttcatcccaacacatgaatatcgtgaaattgacaattttcagttggtcactctttcggttctctccaaagctatcttctgacagctctctaccctggctcttctgatggtgttgctcttactggcttctctatgaatgccacttggctcggccagactcttgctgactggaacctgcacctcgctcgtctcaaccagcctctccgtttcggcaaccaggctatttcacgcaccaagaccaacactgcttggctcggacagaacgtcatctctatccttcagtctgctcttggtgctgtcggtatcaacctttcaagctacgagctttgggaagaaatcgccactaccgaagttggtgacattattaacggctggaatgctaccgtggctcctgttgcacaaaacttgcccactggctacctcacttggagcgaccttacatcaaacatttttgccttcctgttccctggccacttcgatattggcgccgctgtctacgctgagatgaccaagcagcccgtcgctctcggagagattttcaccctcggaaatggtgctcccgcatcttctccccacaccggccctgctcttgtcctgaccggtcgccaagacaccatctactgcggtggtgactgtctcgctactggtggtgccgctgctagcattcccgctggagttgccaaagctttccctaatgccagcaagttcgaggcttacattcacccaaacactggccatggaattaacttccacaagaatggtatgtcgtctcagatgtacgaacgttgaaatgcgtgggatatgctaacgtcttttgtgtttcagccaccggtgcctaccaggtcattcaaaacttcttctcctccaacggtctccagagctcatag

SEQ ID NO: 2065 - DNA, 1758 bp, Aureobasidium pullulans
atgtcattcaaacatatcgttaccctactttccggcctcgccgccttgtctgcggcatcgcccttggtcaacgcgcatgcggctgctccgactgtcaccattgcctccggtgtgatcattggaactgctactggtgttctcaatcaacctactgtgaccgggctcgtaaatgcctaccttggcatcccatatgcaagcccacccaagaggtttgaagcacctgttcctgcaccagcctggaacacatctctcaacgctcagaaatatggtgctgcttgtattcagcagttcaatggttcgggtatgtcattctcagtcagagcttcgctgagtagccagctaatctaggatcagttgttggccccttttccgaagattgcttgttcgccaacgtctatgtaccccccaacaccacggcgtcaaaccagaaggcagtgatgttctggattcatggtgtaagtacaaaacattctcgagaggagatgtgagctgacaaatcacagggtgatttggccattggcgcctcttcggagacgacattcaatgcaagctctctagctgtaaaccacgacgttatcgtcgttaccttcaactaccgtctcggcagtacgtatgttgaacgccttttctgaagggcttgctgactgtagtgtagtcttcggtttcccaaactctcccgaccttccaacatcccagcgcaacccaggttaccttgatcaacgtcttgccttgcagtggactcgagacaatatcaacgcttttggtggagacaaagcaaacatcaccatattcggagagtctgccggtggttactctgtcgctcaacttcttgcaaacccacccaagcctttgcccttcgtcgctgcaatcatggagtcgcctctgatcctcctgcccggtaacggtactaagaactggaacaacgtcagcgcacactttggttgcgctactgcgaactcatctcttgagtgcctacagaaagttgatgtctcggatttgagtggctacatccagagcagtggaattggtcttctttggcctccagcgatcgatggtgccactcaggttgagagcatctcggacgctatatctgccaagtcttttgctcatgtccctgtatacatgggcacgaacactggagaattcgacggtcttctgaagactctgggcctcggcaaaaacatcaacaacaatgcgactgaacagctgttcgctctcttcggattgaatcttacttcgatcacagagcttctggcacccaagtatcctcagaagcttgctccagtggatttggttggacagatcctcacagatctgttcttcacctgcccagtggccaagttctcacgggagctcgccgccaaccaatacgatacatggagatactggtatggattggtcactcccacctttggctctgactatgctgctcatgcctcggaagtaaaccaagtcttcggatcctatcctctacagaacgagaacggaaaggccacaagcgatcaaatcaaattgagcgcattgatgcagacagtctggaccaactttgccaaagacccacactgtggccctggatggcctcagatttcgaccaattccataaacaacaagtttggcttgtttggtggtgttcgcaattcgagtggcctgcagatcattcctactttgacagctgactttgcttgtggtatgcttgatggtgttgctactctgagtaaagctggtgtgttggaggtcaacactccattcaagatctga

SEQ ID NO: 2066 - DNA, 435 bp, Aureobasidium pullulans
atgcacttctccaccttcaccgccgccagcatcctcgctctcgcctcttccaccttcgccagcaaggtcgcagtcaagaacaactgcccccaggacatcttcctccaaatcacccgtcaagaccaatcccacactcagcaaaagatcgcctccaacggtggctacttcagcgagcagctgaacggacaaggcaacagctacggcatcaccaagaaccaagactactactcccccaacacccccaagctcatctggggtgcttccgacagcgctggtgtcgtctactactctctcaacaacgtcgacggcaaccccttcaacggacagagcgttaagctcaccggcaaccagcagtcttgccctgctgttacttctgttgatggcagcaccaaggcttgctccaacgtcaacgacttcacccttaccctctgctag

SEQ ID NO: 2067 - DNA, 1865 bp, Aureobasidium pullulans
atggtctccaagtacgcagccttgatggctttgatcggctctgttgccgctcagggttactcaaacagcagttcgattgcttcgactacctcttctgcctctggtgcagcatacaccaacggtgctgagcccaccgtgggaggcacaactttcctcatccagaccgacaccacctacagtgatgccactgtcctgactctttcgagaaagagacaggcaagctctggaattgcctcttgcttggctacttgctctgacagcgatcgttgtgtcggtacctcgtactcggacgacactatgcaatgcacatactacagcagcattgactcaacctcgagcactccctcccccggcaccgactttgctcttgtccaggaccgtgctacctcttccaccacctcggatgtcttcaacggcactacccctgttacttctggatctccttccaccagaacttccggtgtttcggtttctggtgccaacaactccactactcgtgccactggtagctccactcgctctgctggagtctctggagtcaacaactccaccactcgtgccactggcagcgcatcgcgtacttccagcactgtctctcgcacttccggttctgtccccaccagcgtcccctcctcgctccttaccatcaacggtgttctcttcctcattgagattgacatcaactaccgtggtattactatcgacttcgccattctgtccaagcgtgctggtgagaccctcgaccagtgcttgaccacctgcgctgccaacgctgcctgtgctggcaccggtttcgaggacggcacctgtactttctacagctccattgaggacggaagccgtgttgttgataccggaaacactttcgccactgtaagtataaaaactgaaatttttaccacatcttttactcacaccatcttcaggtcatctctcgcgctggagccatcggatccggaaacaatggaaccgcccctggtgttaacggaaccactcctgctcccgccagcaacgtcaccgccgagtctcttatctggtgagtaatactttggaatcacccccagcaccaccatcatgctaactgtatctcaagtcctcaattcaacggtcaagtcgtaacttcttccgtagatgttaccttcgccgtcagctgtagccagttccttatcggcacgacttttgatattacccctgaattgttgagcaagcgccaggccgtcgacactggacttccccagaccatctctaactgcatcgatctgtgctctctttccgagagctgtgtgggaactaccttcaacattgcacgctctgagtgcacctactactccaacgtcgattattcaactgagttggctggcttcgattcggccactcgtgttcaggacaactctgatggaaacggtgagggctctgtcaccaccactactgtcgtcgcccccggtgtcacatctaccgtcgtcgttggcgccgctaccaccgccactgtctacaccactgtcgtaagcactgttacagtctacgctggatccgattcaactgccttcccctcgggagccgtcgtcacaacaatcttccctgtcggaacaactacctatatcaatgctgtgcctaccatcacccttcctcagcagcaaaacaacgccgtacctaccgtgacagtcactgtcggatccggagctgctgtcgagacctctgtcgtcactgtcactgtcgactcaaacggcaacgtccttggttcttccactgctggtgccgtcgccggtggcgccgctggagctgcttacccgaccgtgaccgtctaccaaaacaactgccctacccaggctgcgcctgtaacttggacaacggttttcgtgagatag

SEQ ID NO: 2068 - DNA, 1654 bp, Aureobasidium pullulans
atgccttctccagtggtgattggtgttgctgctcttgtggtatttctcgttgttcgatacctcaattcgtccgacattcccagaatcaaaaatcttcctgagattcctggagtgcctctgtttggcaatttgcttcaattgggaaccgaccatgctctcgttgctcgaaagtgggcgaagcaatatggtccagttttccagacccgcttaggaaacaaggtaagccttccatggcagagtgacggcggataaacatgctgaaagttggaacagcgtattgtgttcgcaaacactttcgattccgtcaagcacttgtgggtcacaaaccaatcagcattgatctctcgacctaccctgcataccttccacaccgtggtttcgtcctcgagcggattcaccatcggaacctctccatgggatccaagctgcaaggaacgaaggaaggcagcagcaaccgctctcaatcgtcctgcagtgcaaagctacatgcccttcatcgattttgaagcaacaagatcgatcaaggagatgcttgcggactcgaaagatggtaccatcgacatcgaccccaatccatactttcagcgatacgctttgagcacgagtcttaccctcaattacggcatcaaaattgaaggcagcatcgacaacgagatgctcaaagaaatcactcatgttgagcgtgagatcagtaacttcaggtccacatcgaacaactggcaagactacatcccgctgatgagactttggccatcgaacaacaagaagccactcgagtacaagcagcgtagaacagcatacatgacgaaattgctgaacatgctgaaagagaagattagaaccggtacagaccgaccatgcattactggcaatattctcaaggacccggaagcgaagctcaacgatgccgagatcatgtccatctgtcttacaatggtcagtgccggcctggataccgttccaggaaacctagttatgtgtttggcatatctctcgtccgagcacggtcaacagatccagaaacgggctcttgatgagatcaacaaggtatatccgaacggcgacgcatgggagaaatgtctggtcgaagaaaaggttccctacatcacagccttagtcaaagagactctgaggttctggtccgtcatcccaatctgtctgccacgagtcagcatcaaggatatcgaatggcaaggcgccgtgattccctctggcactaccttttacatgaacgcttacgcggccaactacgacgaatcgcacttcacgaaccccttcaagtttgagcccgagagatatctggacaaggagatgtcaggtatcgagcacttcggatacggagctggcagtcgaatgtgtgcaggcagtcacttgggcaatcgcgagctgtacactgcatttttgagactcatcacggcgttccaattcgtgtcaccgaaggatccaagagacagtccagttcttgatgcactggatgcgaatgctcttcccaccagtcttaccgtaggtttgtccaattatgttccaggaagatgcatgactgacaagcccgcagatggaaccaaagccattcaaggttggccttcgcgtgcgcgacaggcagcagctagaccagtggattagagagagcgaggacagaacagcagatctttga

SEQ ID NO: 2069 - DNA, 846 bp, Aureobasidium pullulans
atgcttccccgactcttgctagctttagtagtgtcgactttcgccattccttcggcctgtagagatgtcaacaacactcttgtagcgagacaaggatggcgaaccaactttagcttgacacgtggatcttttggtgcaatcggctatacgtttgccgatggcgccgacaggatgcaggccatcatgaacaattgccgaggttataaggaaggacgggagtggaccaatgtagattgcgtcttccaagcaatcaagactgcttctggatacgcattgtttgtactcggtcttggggtcgactcaaacgcgatggcaacattgatccaaagagccgaatccatcgctaccgcaggtgcagcttttgccaaaagacaggagggactggatgatctggaagtcttcggatacatcaagaccaacaatgtcaccgagaacgtggttaaggcaccatcgagtatgctggagggattgagtgaagatcagctggcggtgttcgtccagatggctacagcaggaacggactctactggaaacgggaccttgagtaagcgctattgtccccaccataatatccgctcagacagagagtggtttgtcttcaactggaactacggcatcaaggtccaatgtaaagcaggatgtgacctgagacacatcaactggaatgatatgtatgctatcatggacgcaacgacatgggagatgtatatcaacaacaagctcaatgtccagtatacgatctacaacaatgccaaccgcgtggtgatgcgttgttttgcaactctccaatccaatttggcagactcttgtccggagtacatcacaggagactcctgctttgtgtga

SEQ ID NO: 2070 - DNA, 30 bp, Aureobasidium pullulans; identical to SEQ ID NO: 258
  misc_feature (1)..(30): n is a, c, g, or t

SEQ ID NO: 2071 - DNA, 30 bp, Aureobasidium pullulans; identical to SEQ ID NO: 258
  misc_feature (1)..(30): n is a, c, g, or t

SEQ ID NO: 2072 - DNA, 30 bp, Aureobasidium pullulans; identical to SEQ ID NO: 258
  misc_feature (1)..(30): n is a, c, g, or t

SEQ ID NO: 2073 - DNA, 30 bp, Aureobasidium pullulans; identical to SEQ ID NO: 258
  misc_feature (1)..(30): n is a, c, g, or t

SEQ ID NO: 2074 - DNA, 30 bp, Aureobasidium pullulans; identical to SEQ ID NO: 258
  misc_feature (1)..(30): n is a, c, g, or t

SEQ ID NO: 2075 - DNA, 30 bp, Aureobasidium pullulans; identical to SEQ ID NO: 258
  misc_feature (1)..(30): n is a, c, g, or t

SEQ ID NO: 2076 - DNA, 30 bp, Aureobasidium pullulans; identical to SEQ ID NO: 258
  misc_feature (1)..(30): n is a, c, g, or t

SEQ ID NO: 2077 - DNA, 30 bp, Aureobasidium pullulans; identical to SEQ ID NO: 258
  misc_feature (1)..(30): n is a, c, g, or t

SEQ ID NO: 2078 - DNA, 30 bp, Aureobasidium pullulans; identical to SEQ ID NO: 258
  misc_feature (1)..(30): n is a, c, g, or t

SEQ ID NO: 2079 - DNA, 30 bp, Aureobasidium pullulans; identical to SEQ ID NO: 258
  misc_feature (1)..(30): n is a, c, g, or t

SEQ ID NO: 2080 - DNA, 30 bp, Aureobasidium pullulans; identical to SEQ ID NO: 258
  misc_feature (1)..(30): n is a, c, g, or t

SEQ ID NO: 2081 - DNA, 30 bp, Aureobasidium pullulans; identical to SEQ ID NO: 258
  misc_feature (1)..(30): n is a, c, g, or t

SEQ ID NO: 2082 - DNA, 30 bp, Aureobasidium pullulans; identical to SEQ ID NO: 258
  misc_feature (1)..(30): n is a, c, g, or t

SEQ ID NO: 2083 - DNA, 30 bp, Aureobasidium pullulans; identical to SEQ ID NO: 258
  misc_feature (1)..(30): n is a, c, g, or t

SEQ ID NO: 2084 - DNA, 30 bp, Aureobasidium pullulans; identical to SEQ ID NO: 258
  misc_feature (1)..(30): n is a, c, g, or t

SEQ ID NO: 2085 - DNA, 30 bp, Aureobasidium pullulans; identical to SEQ ID NO: 258
  misc_feature (1)..(30): n is a, c, g, or t

SEQ ID NO: 2086 - DNA, 30 bp, Aureobasidium pullulans; identical to SEQ ID NO: 258
  misc_feature (1)..(30): n is a, c, g, or t

SEQ ID NO: 2087 - DNA, 30 bp, Aureobasidium pullulans; identical to SEQ ID NO: 258
  misc_feature (1)..(30): n is a, c, g, or t

SEQ ID NO: 2088 - DNA, 30 bp, Aureobasidium pullulans; identical to SEQ ID NO: 258
  misc_feature (1)..(30): n is a, c, g, or t

SEQ ID NO: 2089 - DNA, 30 bp, Aureobasidium pullulans; identical to SEQ ID NO: 258
  misc_feature (1)..(30): n is a, c, g, or t

SEQ ID NO: 2090 - DNA, 30 bp, Aureobasidium pullulans; identical to SEQ ID NO: 258
  misc_feature (1)..(30): n is a, c, g, or t

SEQ ID NO: 2091 - DNA, 30 bp, Aureobasidium pullulans; identical to SEQ ID NO: 258
  misc_feature (1)..(30): n is a, c, g, or t

SEQ ID NO: 2092 - DNA, 30 bp, Aureobasidium pullulans; identical to SEQ ID NO: 258
  misc_feature (1)..(30): n is a, c, g, or t

SEQ ID NO: 2093 - DNA, 30 bp, Aureobasidium pullulans; identical to SEQ ID NO: 258
  misc_feature (1)..(30): n is a, c, g, or t

SEQ ID NO: 2094 - DNA, 30 bp, Aureobasidium pullulans; identical to SEQ ID NO: 258
  misc_feature (1)..(30): n is a, c, g, or t

SEQ ID NO: 2095 - DNA, 30 bp, Aureobasidium pullulans; identical to SEQ ID NO: 258
  misc_feature (1)..(30): n is a, c, g, or t

SEQ ID NO: 2096 - DNA, 30 bp, Aureobasidium pullulans; identical to SEQ ID NO: 258
  misc_feature (1)..(30): n is a, c, g, or t

SEQ ID NO: 2097 - DNA, 30 bp, Aureobasidium pullulans; identical to SEQ ID NO: 258
  misc_feature (1)..(30): n is a, c, g, or t

SEQ ID NO: 2098 - DNA, 30 bp, Aureobasidium pullulans; identical to SEQ ID NO: 258
  misc_feature (1)..(30): n is a, c, g, or t

SEQ ID NO: 2099 - DNA, 30 bp, Aureobasidium pullulans; identical to SEQ ID NO: 258
  misc_feature (1)..(30): n is a, c, g, or t

SEQ ID NO: 2100 - DNA, 30 bp, Aureobasidium pullulans; identical to SEQ ID NO: 258
  misc_feature (1)..(30): n is a, c, g, or t

SEQ ID NO: 2101 - DNA, 30 bp, Aureobasidium pullulans; identical to SEQ ID NO: 258
  misc_feature (1)..(30): n is a, c, g, or t

SEQ ID NO: 2102 - DNA, 30 bp, Aureobasidium pullulans; identical to SEQ ID NO: 258
  misc_feature (1)..(30): n is a, c, g, or t

SEQ ID NO: 2103 - DNA, 30 bp, Aureobasidium pullulans; identical to SEQ ID NO: 258
  misc_feature (1)..(30): n is a, c, g, or t

SEQ ID NO: 2104 - DNA, 30 bp, Aureobasidium pullulans; identical to SEQ ID NO: 258
  misc_feature (1)..(30): n is a, c, g, or t

SEQ ID NO: 2105 - DNA, 30 bp, Aureobasidium pullulans; identical to SEQ ID NO: 258
  misc_feature (1)..(30): n is a, c, g, or t

SEQ ID NO: 2106 - DNA, 30 bp, Aureobasidium pullulans; identical to SEQ ID NO: 258
  misc_feature (1)..(30): n is a, c, g, or t

SEQ ID NO: 2107 - DNA, 1434 bp, Aureobasidium pullulans
atgtctatccgttcgctgctcagctttggcttgttggctgcacctctggtgtctgccctgcctgctgctgattacaagtcaacttcttgcagcaccagcacttcccacagtacttcgcactcgacttctcactctacctctcattcttcaactcacacttctactcacacttccacttccacccatacttctgcccacagctcttctgcaacttctgcagttgtcaccacgaccaccagctctgcttccaacactgtgcagactacaactcttgtagctacagctactggaaagaagggtctggatacttatgccaaaaaggctggcaagctctactttggcacagcagcagatgtccctggaaccaatgagaccaccgacaagtactaccgtgccgagctcgccaacaacgcagattggggatcagtcactcccgccaatgccatgaagtaagagaaaacgtcaagatatctacttatttggaatcggatgattaaccttctcccaggtgggtctttaccgagcctgaacaaggcgtcttcaactacaccgaagcagaactcttcctcgccgccgcaaaccccaacggcaagagaaaagtccgctgccacaacctgaactggtacaaccaactccccaactgggtcacttcaggcacctggacaaacgagactttgaccgctgtgctgatcaaccacgtgacccacctcgtcgagtacttcggcgaccgctgctacgcctgggatgtcgtaaacgaagccctcagcgacagcggcacgggcaacctcgccgacaacagcacctggagatcggatatctggtacaacaccatcggccccaactacgtcgccgtcgccttcaaagccgccgaagccgccgtcaaagccaacaaactgaaggtcaagctttactacaatgattacaacatcgaaagcgctggcaacaaggccactgccgctcaagctctggtcaaaagcctcaaggatgctggaatccaaatcgatggcgctggtctgcaatcccacttcatcgtcggaagcacaccttctagagctgctcaaactgcaaacatgaatgcattcgctgctctgggtgtcgatgtcgccatcactgaattagatatccgcactaccgtccctgcaaccgctgccgctcaacaacaacaagttgtcgactacgccagctctgtaggcgcttgcgcagacgttgatgcttgtgtaggcgtcacagcctgggactttgacgatgcttacagttggatcccatcaactttccctggccaaggctatggagatcttttcttccagcctggtggttatggtactcctctggtccgcaaggctgcctatgatggatgtatccaggtaagtcgtttatgttttcgattgtcgagatgcaacgctgacatgggcataatagggtctcaccagctag

SEQ ID NO: 2108 - DNA, 30 bp, Aureobasidium pullulans; identical to SEQ ID NO: 258
  misc_feature (1)..(30): n is a, c, g, or t

SEQ ID NO: 2109 - DNA, 30 bp, Aureobasidium pullulans; identical to SEQ ID NO: 258
  misc_feature (1)..(30): n is a, c, g, or t

SEQ ID NO: 2110 - DNA, 30 bp, Aureobasidium pullulans; identical to SEQ ID NO: 258
  misc_feature (1)..(30): n is a, c, g, or t

SEQ ID NO: 2111 - DNA, 1434 bp, Aureobasidium pullulans; identical to SEQ ID NO: 2060

SEQ ID NO: 2112 - DNA, 1206 bp, Aureobasidium pullulans
atgcgattaacagccctcgccacggtcgcgtccctcacactcacacaaaccgcttactcccaaacgacgagtagctgcaatccgacacaacaatacagctgtcctgctgatccggcactctccaagtcggtcaatgtcgattttacctctggcgaatcggatcagtttacagcgtctggcttaccgacatacgattcgaatggcgcatcattcacggttgcccagtcaggcgatgcacctatgcttacatcgaattggtacatcatgtttggaaaagtcgaggtaaagatgaaggcagctccaggccaaggcatagtcagcagctgtgttttacaatcagacgacctggacgagatcgattgggaatgggtcgggaatcagcaagaccaagtacagtcaatatacttcaggaaaggagatgcttcgacttctggccgcggcgcagccttccacatggacaatcctacagaagacttccacacctacaccatcgattggacatccacagaactggtctggcaggtggatgggaagacacaacgtgccctcaaagctaccgatgctggagatcagtaccctcaaacgcccatgctggtcaagcttggtatctggagtggtggtgactcgtcgaatgctcccggcaccattgcttgggcaggaggcaacacggattactcggcagggccgtacacgatggtggttcaatcgattgctgtcacagactattcgaccggcaagtcttactcatactcggaccagactggaagctggaccagtatcaaagcggccggagggtccatcaatggaggttcgaccaatgttgacacttcggcacctgctatcacttcggtcgtcagcggtgccgttccgtttgaaggaactcatcgaacctcgacttcggtctcgaccccaggtatcggcaactggagagccacagcatccggcatgaccagcacggtagccaccacgtaccccggattgcccagcggatggacagtaaacggttcaggcaaggtagtgcctccaagcaaagccaccacaggtgagtcactggacccagaccgcaaccccttgaactcagacactgaccagctcttcagtttcgataccccttcgtatgcttctcctcatcagctgcagtctttctttgggtttagccatgggcttcctcttgtgaagactctgcccagagaccccgcttcctga

SEQ ID NO: 2113 - DNA, 1422 bp, Aureobasidium pullulans
atgaagacattccacgctgtggctgccttgaccgtggcagcggcctcggccgttcaggccatgatcacctgcgactccaacaacccttgcccttcaagcgctccttgctgctcttcctatggattctgcggtgttggcgcctactgtctgggaggatgttaccccaaggactctttcagcatggactcttgcatgcccgcacccgtctgcaagtcgtccgattatgactttaacaacatgaatggctttattgagaacacggaatacttgggcgacccgtcaagcggcaattgggtcttttcaggtgacccgctgatgtacaacaacgaggctgtcttgctcaccatgactgaggactcgtctggtactcttctcagtagcacacgctatgtctggtacggcaagatgagcgccaccatgaagaccagtcgtggtgccggtgttgtcactgccttcatcatgatgagtgacgtaaaggacgagatcgactttgaattcatcggtaccgatgttcagactgcccagagtaactactacttccagggtatcactgattgtaagttttgccgtatgtctggtcgaccctgcgcatcaactaattgatttacagacggaaacgaaaagaacctttcttctcccaacactgactctcaatggcacacttacacaatcgactggcaacccgactcgctcagctgggaggttgatggcaaggtccttcgtactctctaccgcaacgagacctacaacgagactgccggccagtaccactaccctcagactccttccagagttcaattctctttgtggcctgctggtaaggctggcaacgctcaaggtaccattgaatgggctggtggtgagatcgactggagcagtccttacatgcagaacggctactactacgccatggtcaaggacgttaccgtcgactgctacaaccctcctgctggctacaacaaccaaggcaacaaggcttactggtacgagaacaagtatggaaccaacgacaccgtcgtcgttggcaataacggtactaccttgtcatcgttccttgccactggtgaagagcccaagaagggtgccagttccagcgcaagcaacactgctaccaagagcggcggcaagtcgtctgcttcatcctctgcaactgctcagcctgagactattcctggtgtttccggtggtggttcgcgcgagtctggcagtgatgtcgctagcggctctggctcatcatcaggcagcagtggatcgtctggctcgtcgggctcttctggatcgtccgattctggtgccaacactggatccagctccttctctcagggtctcgagactggcagcggtaccaacgatggcaacagagttgtcgccggcagccttgtcgcgctcgtggccttctttgccgcagccatgatgctttaa

SEQ ID NO: 2114 - DNA, 1553 bp, Aureobasidium pullulans
atgcgagcgacgctgctagtgctaatcgcagcattagcatatgtgtcccaggcgtcacgctatgttttgtacctgaccgctcagcacgaggtgtaccctccagcggttcatatcgcggatgtgacgcacgtcacactggctttcatgaagtcttctatcttcaatggaaagcccccgtccaaatggccactctttaccgatgttgaaacagtgcgaaagaagtttcctaagaaagatcttgcagttctgatagccattggcggatggggtgataccagaggcttctccgccgcggctgcatctcagatgggcagaaaagcgtttgcggaaaacattaaggcaatgcttgactccaccggtgcggacggagttgaccttgactgggaatacccgggcggcaatggtgaagattacaagcaaatcaccaattccgaaaagagctgggaggttggggtatatcctaaacttctcgccgagatccgagctgccatcggacctgacaaaatcatgtcagcagcagtcccgtaagtcaatttaatgtgcagccaccatgagtcggattcggctagcctcaactagctcaccagtcccataaactcgtgggacttcggtgaacagtatgaagcacaacctgaaaccggtatcaaagatatgaccaacaggcttcctgatggacaaataccctcatgcctctacctttcgtcctctcacaggtgtacatgaggcgtatgtggaagttgtggttttcttcacgatatgatgatcgctttatcagatgagttacggagctagtagatcttcgactcatgatttggcacacttttctggagcgagaatttatgctaacattctgttccaaggggcaagcccgtcgacatccaagttgccttcaccaaagatacactcgtggaggccatgaagtatctagactacgtcaacatcatgacatatgacttgatgaacaggcgtgacaatgtcaccgcgcatcacactggcattgacaattctctgattgccatcgatacgtatttaaacaatggcgttcctgctgagaaagcgaatttgggatttgctttctacgtcaaatggttccggacgacagaagagtgcgctcagaaggctttgggctgtaagacagtcgagatggaagacccgaagacaggcagggacctagggcaaagtggagctttctcatggcacgacaaaatcccaacagagctcaagaagtctttcgaaaaggctgttcccaacgctatgtacgacgatgacggcaactattactgggacgcagaagagaagatcttttggtcgtgggatacccctgcttccatggcgaagaagtttccagccatcgttcagcctcgtaagcttggaggcgttttcgcgtggggattaggagaggatgccaacgcattcatccatttgaagaccttgaatgcagtctttagaaagtatctcaagctgtaggttgcctatatcacaggtgctcgatctcgactgaccgcatgattagaaagcctaagggtaaccgaccagcaaaagatgagctctga

SEQ ID NO: 2115 - DNA, 1820 bp, Aureobasidium pullulans; identical to SEQ ID NO: 1775

SEQ ID NO: 2116 - DNA, 1541 bp, Aureobasidium pullulans
atgatttcaactaatctctggacacttcttgcgttggcgactcccatagtgtcagcaggtggtggtgtgcattactccactcatggaaaacgacctcaatgcacagtactcgccaatggaggctccaccaacgacgttcccaacattctcaaagcatttagcaaatgtggaaacggaggcgacatcatcttcccagaaaaccaaaactactacattgcttcaaagttgaatcctgttgtaaacgatgtcaatattgattggcagggcatttggactgtaggcatggagtgtaacagttgatgatgagagaaggtgctaacagaaaaccagttttctcccgatattgagtattggagacagaatagctctacctatccgatcgctttccagaatcatgctgcctcgttcatcttgacgggcgatcacattcgcattaacggatatggaacaggaggcatcttcggaaatggtgatacctggtgagttctgcatctatccagtcttcgagtacacgaaactcatccctgatgacaggtatactgcggaggctggacataccgtacccggcagaccaatgccaatggtcttctggaacgtctcggatgtgacagtaaagaagttcttcgtcaaggatccacctctgtggagtttcaacatcatgaatggcacagacatgtggattgacgagttatactgcaacgccaccgcaacacaagcaaacgcaagtcagaattgggtgcagaacaccgatggatttggtaagttgctttgaagatcgacaatgtatgatcagttgtactgacttgatgcaagatacgatggactcgaagaacatccgtctcaccaacttcgtataccaaggtggtgacgactgcattgccatcaagcccagatcttacaatatcttcgtccaaaatgcaacctgcagaggaggcaacggcatggccattggcagcgtagggcaatacctcgaggacaacactgtcgagaacgtaatcgtggatgatgtaaaggcaagtctcctctccaatctaccagcgccaccaagcagcgactaacttcgatcccagatcatccgctggaacgaagatatgcacggctccgtcctgattaagacctgggtcggcgccctggtcccacagaacccgtccgcaaacggctactacgaaaatgcaggcctccctcgcggtggcggctggggatccgtccgtaacatccacttctcaaactttgtcgtccaaggcgcagatgcaggtcccaccatcgatcagaactcgggcaacaatggcagttttgcgggtaccagcttgatggatataagcaatattgcttttaccaacttcactggctggttgtctggcaaggagtccaaaaatcggacggcaagtgtgagttgttcgaaggtgcatccgtgcttcaacatcaatttcgacaatgtcacgctgacgacggcgcaaaactcgacgagtacggggacgggtagttgtagttacatgtcgcctggaggtgtgcatggtctttctggaagcgggtgttcgtaa

SEQ ID NO: 2117 - DNA, 1398 bp, Aureobasidium pullulans
atgaggttctccaacgctgctgtagtctcaaccatcctattcctctcggtatgtgcagccgagctcgagtgcgctagtcgtactcctacagcctcacaagcgacacttccgttacatcttggccccacctatccgacaagttcctctcttgctacctccgccgaacctcataccgtacacactcaatgcgaggtggtgcctcttggatggggtcgcgacgatgcaccacagatcctaaaggctgtcgagctttgtggcaacggaggcacgatcaccttgcctgcgccttacacgtacacaatctcaagtcgtctctacatgcgacttactcgtgcaacattgaacgtccatggtcttctctcattcacgcccgatcttggttactggatcgaaaactcccaccgcgtcgagttccagaacatgagcacagcttggatcatcgaaggtaatgactttattgttgatggtggaggctggcaacaaggtggcatcaatggaaatggacaggcttggtatggtcgagccgcaggtcaaagtaaccagtatggacgtccgatcagtctttcaatctacaacagtgcgaacgtcagcatcaacaactttgccttctatcaaccacagttctggtctgtctgggctcaagactcgcgaaatattaccatgaccaacatctacatcaatggaatcaacaccgatcctgctggcaacagttcaaattatgccatcaacgtcgatggtatcgatactatgcgcgtcgatcagatgagacttgagaactggacattccacggaggagacgactgctttgctccgaaaggaaattcgacaaacatggttctacgcaacttcacctgcataggaggtggtatcgctttcgggagtgttggccagtatcccggtcaccctgattttatcatcaacgttagcgtgagcgacattcgtgtcagtcaaaaaatcgatgcaaagtatggtggcgcggctgtcgctgcaggggcttacttcaagtcatgggtcggagtggagatgggaaacccacctcaaggaggaggcgggggtaccggccgagtgtcgaatgtgactttccacaacctcattgtcgaaaataccacacaggctgtctacatcaacaagtgctacttcaaagtgcctgctcaaggtgcatactgcaacacctcaacattcgagttccaagacttcgacttcaacaacgtcagcggcacagttcgcacaccaattggtgtcaacctcaactgctcacaagcagcaccttgccgtgaactgaagttcagcgagctcaacttgcggcaatccaaaaccaacaaaactgccattgctgtttttgagaatgctcaaaacgtctttggattgagcgagggtacccgaatgttttcacattga

SEQ ID NO: 2118 - DNA, 30 bp, Aureobasidium pullulans; identical to SEQ ID NO: 258
  misc_feature (1)..(30): n is a, c, g, or t

SEQ ID NO: 2119 - DNA, 5098 bp, Aureobasidium pullulans
atgaaaaccagtttagccgttctaggcgctgcaaccctttgtgcagcctctgtctccaacactaccaaagacggccttatcaccaatggactcgtctctcttggagattggcagagtgccttcgacaaagctcaaaactttgtctcacagcttactaccgaagagaaaatcaccatcatcggagctggatctctgaccaacacctctgcaaattggacagctctcgggatttcggatggtccacaaggagcgcagaacttctactacgaaagcgccttctcgatgacatgtgccttggctatgacttgggacaaagacgctatctacaaacaaggcaaagctgtcgctaccgagttttaccagaagggcttgcaaatgttggctgggcctgtatcaaaccccatgggcagatcagcttggggtggccgtaatggtgaatcgtttggaccagacgcctattttaacggtattctcggtggcatcagtgcaaaagcctaccaggcaggtggtgtcatcgcaggtggaaaagtgagtatatcttgttctgactccgtccaagtcactaaccgcttgtcagcatttcatcctgtacgagcaagagactaatcgtacttcttccatgagcggtggtggtggtatgggaggcggcatgggcggtggccccaccggttcaggcaacagcactatgggcgcttcaacatctggctctgccccgtcaggctctgctccgtcaggaatgactctcaaagcaagagcagacaattcatccactacccaatcttcgaccgagagtgccccttactcgtccaacatagacgacaagacgtttagagagacatacctctggccttggtacgacatcatcaagggtatgtgatcgtcaagcacaaggaaaacttcttactgacgtatatacagctggaactggtgcagtcatgtgcgcaatgaccgaagtcaacaacactgcagcttgtgaagatagctcactccttatgggcatgctcaaaactgatcttggcttccctggaatggtttggccggaccagaacggtcaaaaaacggctcttgggtcagccacaggaggccttgactacggttcaagcagtacctggtctacatcaactatcgaagcattcttgagcaacggctctctttcagaagcccgtctgaatgatatggttatccgcaatgttattggctactacagagccaatctggacaacggagaacagccttccaaggcagactacgatgactacgtcgataccatgtccgaccacgccaacatcattcgtgagaacggagcgaagtcaattgttcttcttaagaacgatggcgctcttcctctgaacaagcctagaagaatgacactcttcggtgccaacgccggacctgtcatgggagggcccaacctgcaattcactgttcagggctctgggccaacataccaaggccatcttgctagtgattctggctccgctcaatcttcgctaccctatctcatcactcctgaagcagctctgacgctcagagcatcgaaggaacataccaatgtcaagtggatcttaaacgacacatacagtacgagcagctcgggcaacactctggttactctatcttcctcagagactgctgtcgatgcttcttatgcgggatatgcggccgccagtgacgtatgcctcgtcttcattaatgctctatcaggcgaaggtgccgatcgaactgagttgtacaacaaggatcaggacaccatggttaacaccgtggctgccaactgcaataacaccatcgtcttcattacttccactggtatccgccttgttgaccaatggattgagaacgaaaacgttactgctgtgctatactctggtcctcttggtcaagaaagtggcaactcaatcaccgacgttctctacggcgatgttaatccctcaggtagacttatccacactatcgcaaagaacgagtcggactacaatgtagagatttgctacacctacaactgcaactacaccgagggcaactacatcgactacaagtactttgaacacagcaacaccaccgctcgttatgctttcggtcacggcttgtcgtacacttccttcggctacagtgacatcaagacgaccaagctcatgtccaacctgtcataccacgccaagggacgtcttgaagttggcggccgtgcagacttgtacgacgtcgttgcagaggtaagtcttactaatacaagcccttgaaaagtatactgacaagcataggtcgatgtcaatgtgcagaacaccggttcgcgtgacggagccgaagtcccacagctctacattggctacccagagggctctggggctgatcaacctctcaaggctctccgcggcttcgagcgtgtagagatcaagaaagacgaacacagccaggtcaagttccagctcagacgcagagatctctcgttctgggacgtcactgcccaggagtgggctttgccgactggtgatttcaagatttatgtcggcgcttcttccacagacattcgacagacgggtacgctggctatgtagatctcagatccttggattccttgctgaagatttgtagagggtggagacggtggtctgttgagattaaacctctggctgggtaagaagcgagaaacaacgccgacggagtttctaccgaacgcaatgtcaaacttaattagcgcacatttgtatgttcaagttcttcccctccattcccactacctgaaggcagttcatatccaggaaagctcgcatcaatttttggagatatatcgactctcgatgaaggtcgcacgtagtcttttgaatctcaataacggaagacctttcgtgcagacaaatagcctagcaagaatctgcttggcgtacgtcggatagaaaagctctgtcactctgtaccaagtcttaggtcaatctcagaaggctggagatccacaatttgcggctccgtcttcccgcccaattatgtcgccagcatcacggagacatcgcgcaacacagagcaacatcttgtggccatctatgaccaatgttctatgatgggtggtctataccaatttcgagagtcttaggctccatctggcctgattgcactgcgctctgaacggcctgagtgcgaacgctgataccaaatctttcgagatccacgttttctgtaacacaagcacgtcccgggatgctgcagccggagccggcgtgcctgtagatcatgaatcttttctcaacttagacgatcgtactgcaccactgcatgggaagtggcgcggcacaggcacagcagaacacgagggcaagtaaacatcaaaagtaggtcgctcctgccagatcttggaccttccttcctcttatctcttttctcccttctttgtcgctctttgtattccatcaatatgttaaagtcattctttttggcggccgcctcttctggccttgccgctgcaatcacttgcgatgacctcgcttcttctctcaccttcaaggatgtcgatgtaatctcggcgtccagctcttactacaccaaaggctcaacgatcaacattgagggcgagcagtcaaatgcctgtttcaagcagacctacccggagatcgatatgtgcagagtcgtcttgactgtggccaccagtcctacttcacacaattacatggaggtgtggcttcccagcggcagcacaccctggaacggccgactcttgggtactcgcaacggcggtctggccggctgcatcgaatatgaggatatggcatactactctagcttaaacttcgctacagtaggagataatggcggtcacaatagctccacttctgatggttcgaagttgctgaacaacaatgaggccgtaatcgatctttcctaccgttccaggcatatttcggtcgttgccgcaaaacaagtcatcaagcagtattacagccagcctgcaagctactcttactatgttggttgcagtactggtggtcgtcaaggtctcaagtctgctcaagagttccctgacgattttgacggaattttggccggatcttctgcctctgacttcaatcacctttcggactggacttctagattcctgttgatcactgggttcggcagtgatgctagagctctatctaaagatcagtgggtctatgttcacgaagaagtccttgctcaatgcgacgagcccctggatggcgttgcagacggcattctcgaggatcccacaatctgcgagttcaacgctgctgctcttcaatgtggcaccagctccgactctcgctgtctcacccagactcaggtccagactgtcaacgacgtctactctgaactctacgaccagaacggaaacttgctctacccttctctgtctctcggagccgaattggttgcttcccagcagggtctcttcaccggctcagtcatcggcaatgccgcaaacttcatctccaacgccgtatacaatgacagcaactgggacccccgcagcctgagtcaagagacctttactagagcagatgagaccgatgtcttgcacggaaacatttcgagttggaacggcgatctcagtgccttccgcagagctggcggcaagttgatgatgtagtaagtaaatacgagtgatatctttttcaagcatcatgctaacttatacatcagtcacggtatggcagaccctaacatcgctggcgagaactctcaacgctactaccttcacgtcgccaaaaccatgggtgccagcgacgaacaattggacgaattcttccgtttttaccgtatctctggtaacggacactgctcttcgggtggcgagggcgcttgggaatttggacagatagcagctgcacgaaacggaaaattcagtgccgtccagcagctggtggattggaccgaaaagggtatcgcccctgacaccatcaccggaaccaaattccacaacgacgaccccaaccagggtgtcgctttcgagcgcagccactgcagattcccttaccgcactacgtacaagggcaacggcctcgatcccaacgtcaccaccagctggacatgcgagaagatcaacaactggcaggagtgcggccctggtgcacttcccagactctgttaa

SEQ ID NO: 2120 - DNA, 3218 bp, Aureobasidium pullulans; identical to SEQ ID NO: 2012

SEQ ID NO: 2121 - DNA, 30 bp, Aureobasidium pullulans; identical to SEQ ID NO: 258
  misc_feature (1)..(30): n is a, c, g, or t

SEQ ID NO: 2122 - DNA, 1723 bp, Aureobasidium pullulans
atgaaggttctaccattcttatacgcaattccattggtatctgccattggcagcagacagcacaagcgcgacgtggagaccttgagtttggagaaggtatgctcatctggaggacttacctaccagaataatctaggggcagaggtagccatggtgctaatgaacctctcagcgtgacatcaaccctgagctcttgtatcctgaatacaacatctcagtgcctgtagaccacttccacaactctactctgtacgaacctcacagcaatgccactttcgatttgaggtattggtttgatgcttcgcactaccaaccaggaggtcccgtcattgtgctacagtccggcgaaaccgatgcttctggtcgtctgccctatctacagaagggtattctggcacaactggcccaagcaactcacggtattggtgttgtgctcgaacatcgctactatggaacatcattcccgactcctgatctgtccaccaagaaccttcgattcttgaccaccgaacaagcacttgcggatgaggcatattttgcaagaaacattgtcttccctggactcgagcatctggatctgacgagtaaatctgctgcatacctcggatatggcggatcgtatgcaggtgctttcaacgccttcctccgtgtcgtctatccagatgtcttttggggaacaatctcgagttctggtgtgaccaaggccatctacaactattacgattatttcaccccaatcgccgagaacggacctccgaagtgtatctctactcaaaagactcttatccacattgttgacaccattcttttgaagaaccagtccgagctcacacatcaactcaagacggcatttggtctcggaaaccttacttacgacgatgactttgccagcactttgtctagcggcattgaaggctggcagagccgtaactgggatcccaaggtcggtagtctcggcttcgacagatactgcaataacatttcatctgatgcaatgctttaccccgctgcatcctcgctccggcctgttgtggagtctctgatcaagaacaccaactacactgtcgaggagaccttggtcaaccgcatgctcaacttcattggctacgtgaaccgtacttctgtggcctcttgctctggtgggagcacacaggacgagtgtttcagtaaccacaactcatccacttaccagcaggacgacttggcttcatacacctggcgctcatgggcttaccaatattgctccgaatggggatacctccagactggatatgcacctccaggccaattgcccatcgtctcgtctctccttgacttagaatacgaaagtattgtgtgcgttgatgccttcaacatcacgactccggcgaacgttgacgcggtgaacaagtacggtggctacgacatcagttacccacgtcttgcttttgtcgatggatctgccgacccctggcgtccagctactcctcacgcatacgcccagggtgctaaggagcgcaactctacttccagtgagcccttcatcttgattgacggagctgttcaccactgggacgagaatggcttgttccccaacgagactacggcctccctacctcccttgccagtcgccgacacccagagacaggagatacagttcgtgcaagaatggatgcaagagtggcagttggagcagcagatcaaggcagcttatcgtaagccagccacccaggggcccatctga

SEQ ID NO: 2123 - DNA, 1035 bp, Aureobasidium pullulans
atgacgccgctatcaattctaattcttggtgtattggctgagttcacctctgcctttcccggcatgggaaacatgcgaagagaggctggtgtgctccctcgcagagccgcggcctctgctgttagttcagcaaacactgctgccagtacctacccagcctggcatccagcacagaagggagaaggtagtaacatgtctgtctcctaaacaagacacctttttgactagttcacagttcgctcaccatgtcccggtctcaactccctggccaatcacgacatttgtccacgaagcggcaaaggatatactattccagtcttgactgattgcttgaagcgaggcttgaacgttggcggtgacttcgctctggtcgtaggcacagcaggcattgggtccaaccccagccctctgacctctggcttgtacttcgaccttgatatgctggatcgacatgactttttgattgagcacgacgggtcattgtctcgtgccgacaccaccacgggcgacaaccacagtttcaaccaaaccatttgggacactgtcctcgcgtactacagtggtatgacagatgctaccattcctgttgcgtccaaagccagattcaaccgcattcagacggaagctgccagagaccccaacttcagctacagccctgtccaattcatcctatcgtatggagagaccgcactttacctgtccacgatgggtgacccaatcactggagttgctcccttggagtacgtccgcagcttgttcgaagaggaaaaactcccttacgagcttggctggcagccaccaaagacgacgacaacattggccagtttgggagcgatggctcttcaactcaacctcgcgagcggtgaacaggttcctgaaggcgtgattctgggagaaaagagtctgagagcggcactgatcggcctcaacgctgccaccggcgagatcgagaacaatgttgtctatgctgtcgcgaagctgactggtgcgctcggtagcttgaccggtgttttgaaaggcttgaccggttcgtag

SEQ ID NO: 2124 - DNA, 2028 bp, Aureobasidium pullulans
atgttgtattcttccctatttgttctggccttgcagtctggcctctctattcgtggagttcaagctactcaatcttcctctcatgagaagagagctctcgacaccgctgctatcgccaaaaagtactttggcaacgacgctccttggtaccaggaccgcatcgcatacttcgaatgtagcgatacacaaatacaagatgtcttctactaccgccagaaaatcttcagagctcatcaacgtgatcttggagccaaaggcttcatctcgacggaattcttggatgatgtcggttggcaactacagccttacgccagtttgaacgatgctactggtttccacattggagaaggtagatggaatagagatcgccgtttcaaggatgattacatcaactacatgctcgggggtggcgacgaccgtcacttcaccgactacatccaggactctgtctggggaagctaccttgttgacaacgatgttcccagtgcgaccaaatggatcgaacagatgaagactctgtacaatcaatggaccgaccactttgataccagcaaggggctgtactacatcgaaccattgttggacgccacagaatataccatctcatccattgacgcttccggcggccaagatggtttcactggtggtgatgccttccgcccaagtatcaacagctacatgtatgccaatggaagagctatcgccaagattgcctctcttgctggccaaaacgatgtcgccactgactacaacaaccgcgccaccaccctcaagaacaacgttcagaagagcctgtggaactcgaccttgagccactttattgatcgctaccaagtcagcaacaactatgtcaaatactgggaccccattcgtggtcgcgagcttgttggcattgtaccctggactttcaaccttcctgataactccactgagtacgcttcgtcgtggaagcacatcttgaacgccaatgagcttggaggaccatacggattgaggactgttgagccttcataccaatactacatgagacagtaccgctatgaaggcacacagcgtgagtgccagtggaacggtcctgtgtggccgttccagaccactcaagcattgttggccatgtccaacctgttggatcactaccagcagagcgttgtcaccaatgccgactatttgagattgctgaagcagtacgcagctctgcactaccagagctccagcactctcaaccttcaagaagactacgatcctgccaccggaaaagcaattgtcggccttgcaagaagccctcactacttccattccggctacattgatctcatcatgaccggttttgtcggcatccgacccagagcagacgacttccttgaaatcaaccctttgatcacaagcgatatcaagtacttccgcgccgaacaagtgccctaccatggtaccaacatcgtcgttcagtgggatgcagacggtagccgctacggtcaaggcgccggtctccgtatcgagcgtgacaatgttgtcatcgctacttcctccaccctcaagcgcttggtcatccccttccaaaagaaagcaatcattgctattaaccgccccattgccaagtccattcaactacaaagctccaccagctatcctgtaggttctgcttcctccggcacagacgtggagaatgtacacgatgctatcgacggccgcatctggttcttctccgaagtcgtcaatggatggaactcggatgtcaactctgccactgctcagtggtacaccgtcaccttccaatccgccacccagatctcacgcgcagagattgcgtggtttgacaatggcaatgactttgtggctcctactgcatactcgatccaagtcctgagcaatggcaactgggttgacattggtggtcaacagaagagtgctgttgtggctaatggtatcaccaatgtgcagttcacttctaccagtgttactcaggtacgacttgccatgactcagccttctgccaagagaaccagacttgtggaagtcaagtacttctag

SEQ ID NO: 2125 - DNA, 1847 bp, Aureobasidium pullulans
atgggtgcattctcccacttgactgcagcagcagtgcttggactatcagtagtcgtaactgcccagaactcgagctcgtctgctgctctacctattgtcgaccttggatatgctcgtcagcaggcttcatcattcaatgtgagttcaatgctccttttccagagacaaaccattaaccatgtgtaggtaactggaggctactacaacttttccaacatccgttatgctgcccctccaattggcgacctccgttttgcagcgcctcaagctcctgctataaacagaactcaagtccaaactggtagcgttagccgtatctgtcctcaagcaaacccagcctggaatgccattgctgcacagttcatcccagcgtacttgctaggacagacaaactttactatgtctgacttcaacctgaccacctccagcaacacaactgcagccccagcgagagaccccagagaaagcgaggattgtcttttcctcgatgtcatggtcccggaaggcattttcaactcaaacgagcagcatcccgttttggtctggatctacggaggtggatacactgccgggtccaaggctggatctggtaaccccgcaggattgctcgagcgctctcaagcggacaactctagcggcgtcatctatgtgtccatgaactaccgtctcggcgctatgggttggctctcaggtcccactttccaggagaacgctacagcaaacgctggtctgcacgatcagaggtttgctctcgactgggtgcaggagaacatccatctgtttggaggtgggttgctaaaattggtcttttgaaaatccctttctgactttgaaacaggtgacccgaaaaatgtaaccgtgtttggtgaaagtgcgggaggaggttcaatcatgcatcagatcactgtaagtatccacttttgctgatctagaccgtcttcacgaaactgaccatcatacaggcttacggtggaaacaaaggtccggttccttttgcaggcgcagtaactcaatcacctggcttcttccctgttgtctctccagcaacacaggagggtgtgtataacgatttcctcgccttgctaaacgtatccaccttggctgaagcacgccgattgccttcgtctgccattattgctgcaaacgcaaaacaagtcgtcgcagcatcctatggccaattcgtctacggacccgctgtagatggcgatttcgtacctgctctgcccggccaattactcgctcgtggccaattcgacaagaacgtctccatcatgaccggtcacaacgcagccgaaggtctgctattcacctctcccttcatcaacagcgatgcagcacttagagacttcctgaccatgagcttcccggctctcagctacatgccatcaacactcaactacatcaccgaaactctctaccccccaattttcgacggcagccaagctcaaaactacacaaaccaaatcggccgttcagaggccatcttgtccgaggtcagcttcacctgcaatgcagtctggctcaacaaggcctacaacaatgaaactcacgcctatctgttcaacgtacctccttcaatccacggtcaggatatcgcatacacatactacaacggtaacggctcagcaagctctaccgtaaccaatgttcccgtcgccatcgccatgcaagagtacatcaccgaattcgcaaagaccggtaaccctaatttgagaggtgctcctttcttccccatgtatggaagcaatgccaccgtgctggctctgggacccagaaacattggaccgatgagagatcctgctgccagtgctagatgcgcttggtggcagaagggtctgttctattag

SEQ ID NO: 2126 - DNA, 1797 bp, Aureobasidium pullulans
atgcggtctgttctccttactcttacggctgttactgctgctttggcagcacctctcgacgagaaacgtgccattggtccttctgcagtcgtcaagaacggaacagtcattggcagcactctggggaatgtcgattccttcaagggcatcccatttgcccttcctcctaccggtagtcttcgattgaagccacctcagtcgattaccgcagcctatccctcaggaacattcgcagccactggcgtacctaaagcatgccctcagttcttcagccaggtcgacagctccgatatcccttctgacgttctcggagagcttctcatgtcacctttgctacaggtggctaccaataccggcgaggattgcctgactctcaacgtgcaacgtccggctggcactacatcatccagcaaactgccagtagtcttctggatctttggcggtggtaagtgcgagaaacaccctgtaggaatgcacgaatattaatcaagccacaggtttcgaggtgggatccactcagatgtacgatggaactcctctcgtctccgaatctgccactctaggccaccctgtcatctacgtcgctgtcaactaccgcgtgggaggcttcggctggctcgctggaaaggagctacaagctgatggatccaccaacctcggactcagagatcaaagaaaaggcctcgagtgggtggctgaaaacattgctgcgtttggtggtgatccggacaaggtcacaatttggggcgaatcagcgtaagttttgtctggtagaagactcctgagcatttctgacatgagagtagtggcgccatctcagtctacgaccagatgatcatcaatggtggcgacaacacgtacaatggcaaggcactattccgaggagctatcatgaactcgggatctatcgtgccagctgtcgaagtttcacacccaaaggctcaggcggtgtacgacctcgtagttaacgcagctggctgctctggtagcagcgatacgcttgaatgcctgagaaccatcgactatgagacatttatgagagctgcagactcggtccctgggcttttcagctaccaaagcatagcattggcataccttcctcgcccggacccctcaagctccttcttcccagtttctcccgaggtcgcgaaccagaacggcaattatgccaaggtgcccatgatcgctggagaccaagaagacgaaggccctctgttcagtctggtccagagcaacatcacaacggatgcgcaattgctcgactacgttgcaagcgccttccccgatacaccaagatcggttgtcgctgctaatgtggccacttatcctaacaatcccagtgctggctcgcctttcagaactggtatcttcaacaacatctacccgcagtacaagcgtctggccgcccttttcggagatgccgtcttcaatcttcgtcgtcgtcaacttctctacactgcctcatctgtcgtccctatgtggagttacctcgacagccatctctacggcactgcagtcttgggaactttccacggtagtgatttgctcgccatcttcttcggtactggtggtgttaccactcagaagacctacctcgactactacacctccttcatcaactatctcgacccgaatgctattggtagtggtgctcctctgatctcttggcctcagtacaacactacgaagcctacgcttttacagttgcaggcggttggcaacaatcttttgcctgatacctaccgcagtgctagtttccagactttgcaggcgaatgttggttctttccgtacttag

SEQ ID NO: 2127 - DNA, 1280 bp, Aureobasidium pullulans
atgcgctttcttctgatatctctcctgagcgcgctatctgtcgtcacacacgcattaccggctcaacaggtccccctccttcgacatgctgcaaacaatcgtacagtttctcccgagctcttctctgatctcgaagagttggctcgcgttgtcgacatctcttattgtgtaggccttaccggtataggcatatcgaaaccgttcaaatgtctcagccgatgctcagagttcccagagttcgaacttgtcaaggtaagacgtgtgtttgtatggttttcatttgtctatgagccgacatgttacactagacatggaataccggccagttgatgtccgattcgtgcggctacatcgccctttctcattctcagacaaaccctcgcatcatcgtcgcattccgcggtacctactcaatcgcaaacacagttgtcgacctttccacagtgcctcaagaatatgctccttaccctggcgacccggattcagacaccaccggcgacgatgaggcagggactccacgatgcaacaactgcactgtacacactggcttctacagctcttggaaagtggcttcatctgccgttctgccagatttggaagcagcaatcgcagcttacccggactatgccttgacgcttgtaggtcactcactgggaggagcagtcgctgcacttgcaggtctggagtttgtttcgcgtggctggaatcctaccgtcaccactttcggcgaaccgaggctcggaaacacagctctgaaccactatctcgaccagcgattcaatctgcttgactcgacccgcgaagtctggactgacattgtcgacgaacgacaactgcgctatcgtcgtgtaacccatgttgacgacccggtgcctctactaccccttacagagtggggttaccgaatgcatgctggcgagatctacatctccaagtctgccttgacaccagacgtacgggatctccaacactgtgcgggcgatgaagaccaccagtgcattgccggacaggatggtagtctgtccacagaatcaatcctcaccaaacgcagcgacctcagagctcaggtcaaacgctcgatcgatgatcttaccgaggagtacgagctggagaagagagacatcggctcatgggttgtgccatctcgctataagttgtggcagttgttcttctctcatcgcgattacttctggcgccttggcctttgtgttccgggcggcgacccctgggactggaatcgcaggccgtatgcaccactcgatgatgaggaccaacactaa

SEQ ID NO: 2128 - DNA, 417 bp, Aureobasidium pullulans
atgaaggtcttcgccagcattctcgccatcgccgccattgcctctgcagccgcaactcccgacgtgaagcgtcgcagcgcagtcctcgcaagccgcgatgcctcagacctctgtggtccccttgacacacccatgtgctgcggtaccgacgtccttggtctcgccgacctgtcatgctcttccggtacgtccttctcttccactttctgccttgttccggatgctgactctttcttgcagtccccagcgatgtcacaaccacagatgacttcactgcctactgcggcgccgagggcctatcttctcactgctgtgttacttctctggtaggttgattagcttttgatatctcttgactgtttaatactgatttctttccagcttggcagtctcggtgtcgcatgcgccgccgcttga

SEQ ID NO: 2129 - DNA, 2335 bp, Aureobasidium pullulans
atgcgctcgttcttcctgctgtccgctgctgcggcactcactctcgcttctcctgttcctcaggagcttgacttcgaccttgtcgatgttgttgagactccctcgaacgttaccatccctaccaacaccgatgagcttatcgtcagctacgactccgatgctgctgctgccgctgtccagacttccgttctgaccggtcagactgagatcgacatctccaacagcactaccaacagcaccagctcttccactcttcgcagacgtggtacctgtgccgttcaggccagcggctccggccctgtcccttctcccgacactgcttcggctttcctctcttactctgcctttgccagcgctgcatccggtgccgccactccttccggctacactcaggctttcaagaacttgaatgcctcgagcaacgcgtaagcatctaccatgacctgtcaccattcttcacgtactgaccatgttgtgcagttatggatacctcggtttcaccaacctcgcctcgtacgacaccgccaagtgtgcccagaagtgtaacgccatctctggctgtgcttccttcaacctttactacgaacgtgaccccagcaaggaccccggtactggctgtgagaaccctgcctcgacaaccaacatcaagtgcgtattctggggtggagacctcactactacaaacgcaaacaacgctggtcagtaccgtagcagcttccaggtcgttattgccggaagcaacggttacgtgaacaacaccatcgagcccgctgatggctacacctctccttcttactacggcaacaccgctatcgacgcccctgttgactgcaatggccagtccaccttccttggaagcaaggtcttcaccggtggtcctttcgatgccagcctttgcgctgctgcttgcgacgcccagagtgccaccaacctgaaggccaacaaggccacttgcaagttcttcaacacttacattcttgctcgcaacaacgtcgccattggccaatactgcaacctttactcccagacttgggcatcgtcttacgctacctacaaaggttccaacagcggtggtaacaagtacaccgtttcttactcttacggtttctccagctctgccgacgctggtacttgcaagaagccctctacttctacctggatcatcagctctgccactgccactgccagctctactgctactgctcagcccaccactgctggtggtttcatcaactggaagactttccaggccaacggtgccaacctcggtggctggctcgagaaggaacagacccacgaccccatctggtgggccagcgtcgccaacctttctaccacccctgacgagtggactctctgccagacccttggcgaccagtgtggtcctactttggaagccagatacgagtcattcttgaacaagtctaccatcgatcaactcgcctccgtcggtgtcaacactctccgtattcctaccacttacgccgcctgggtcaacgttcctggatctgctctctaccacggtaaccagcagcagtacctcaaggctattactgattacgccatcaacacctacggcatgcacatcatcgttggtcttcactccctccccggtggtgtcaacaacctcgacattggtgaggctctcatgcacgacgacttcttctacaacaccaccaacctcaactacgcttacgccgccgttgactccatccttgacttcatcaaggccagcggtaacctgacttcctggaccatcggccccatcaacgaggcctctgacaacctctctggcttcggtacctccgccggtctctccgacaagggtgctcagtgggttgctgactacatcaacggtgttgtcgctcgcaccgccaaggtcgacagccgtatccccgtcatggtccaggactgcttcaagggtgctgccttctgggagccttacttcgacgcatctgccaaccttgtcatcgactcgcacgtttactacttcgctgccgccggtacctactcgcaatatgttgcccctgccgtctgcggtcaggctgccttcatcgccgaggccaccaaattccccaacttcattggcgaatggtccctccagaccatgtacaacaacagcctcgccatttctgagagacagttgatcttcaacacccagcgttacgcctggagcaagtacgtcagcggtggttccttctggactgctgtttcgtactccactgctctcgtcgatggtcagggcactcagagagattactggtcctacaccgacctcatcagcgctggcgtcataaaatcagagtctgccttcaacggcaccgcttactgctag

SEQ ID NO: 2130 - DNA, 1860 bp, Aureobasidium pullulans
atgcatccctcttggtctttgctaccgctcgtggcctctgtcgcctcagccgccccttctctactacgccgggcacctgttggagcacctgtcgtcaacctgaagaatggttcatactatggtgtacacaacagccaatacaaccaggacttcttccttggtgtccctttcgcacagcctccgattgagcaacttcgtttcgccaaccccgagacactgaatctttcctggactggtgctcttccggcgacaaactatgcctttgtatgttgatacaatgcatgaaccctgagtcggtactaatacggagaacaggaatgcattggttacggcggtgatcagattggctatcaacaaagcgaggactgcctctaccttaatgtcgtccgaccttctggctacgagaaccagagcctacctatggtagtctggatccacggtggtggatttgtaagtatttcaccatatactattcccatcgacaatcttacgagtactaacaacgatgaagtatatgggtggagcagttgatcgtagatacaacctgaccttcctggtcgagaactctgtcaagattggtaaaccgatcatggccgccagcatcgcctacagacttggacctttcggattcctcaacggcgacgaagttgctggtgctggtcagaccaacatcggtctcaaggaccagcgtctagctttgcactggcttcaagagaacggtgctgctttcggtgctgatcctaagaaggtcacgatcatgggtgaatctgccggagctgcttccgttggtttccagctgactgcgttcaacggacgtgacgacaagctcttccgtggtgcaatcatggagtctggaaacccaatcgcctatggtgctctgaacacctctgcgtaagtccaaactccatggtacccctaaagtctatcactaatgattgtaacagtgaataccagcccaagtacgccgccctcaccaaggcagccggttgtggaaatgccactagcactctggattgtcttcgtgccctgccactgttcgttcttaacaacatcctgaacaccaccgagttcaacagccgctggaaccctgctctcgatggcgacttcatcgctcgctacggtagcgagcaactcgcagagggagctttcgtccacgtccccatcatcgacggcgccaacagcgacgaaggtgtttcattcagccccaacggaatcaacagcaccgccgacctcgaagtctacctcaacaccaccagcaacacacaatggggcctgactcccgacctcgtcgatgacttactccgcgtctacacttccggcgcccaagactacctcatcccctcaaccgaagaactaggccaaaacgtcacttccctcggcccagcctacggcccctactaccgcgcctcagccgcctacttcggcgacgaagtcttcatcgccaaccgccgcaagacctgcgaaacctgggccgccaacaacgtatccgcctactcctaccgcttcaacgccatccccaccggctccgactacgtcgcacatttccaagaagtggcctttgtgttcaacaacctcgaaggcttgggctacgccatccctccctttgcaaacaaatcttccgcctttaccgaactttctgatttcatgagcaagagttgggtcacttttgtgcatgatttggatcctaatgggtttgacaagggggtcaattcgagtttgcccgcttggccggtgtatagtgttgataagccgcagaatatggtgtttgatgctaatgtaaccagttatgctgagcctgatacttggagagctgagggcatcaagttgatcagcgataataatgttcagtatcatagatag

SEQ ID NO: 2131 - DNA, 2812 bp, Aureobasidium pullulans
atgttgttcaacatcgtcactcttttggctcttgccccttctgttctttccgcagtcaccgataatggtgccaagagacgcaatgttgtccctggtggatacattgtggaattcgaggatgtcatgtccattgcttctgatgtatgtttgaaatccgagtcggacggcttaccattgacatgtctgtagaccaaatctagcttctacaagtcgctctctgacaaaaacatggaccctactcaccgcatggacctttcctcttctcttttcaaaggactttcgttccacgttgataccggccttgaccaagcagtagtcgcacaagatatccaagccatgccccttgtgcgcaaggtctggcctatttcgttatacgacacacaagactttgcaactgctccttacaccaatggatcgaactctacttcgtcttcagacacattctctacccatctcatgggtcacgtcgacagattgcatgccgagggcttgaccggaaatggcacctttgttgccgtcatcgatactggtattgattacctccatccggctcttggtggttgtttcggccctggatgtaaggttgcttatgtaagtaatcggaaaggtaacttcaacggtagctgctaatgttcgacagggctatgacttcgttggtgacgactatgatggtacgaacacacctgtgccagactctgatccatactcggcttgcaacgagcatgggacacacgttgccggtatcgttgcagctggtcctaacccttacaacttcaccggtgttgcgcccgatgcgactcttggtgcttacagagtttttggatgctccggaagctctggtgatgatgttttgattgacgccttcactcgtgcttatgaggatggtgctgatatcatcactgccagtattggtggtcctaacggttggactggtaagttgttctgaatgcggtccgacaagacatggtacttattgtctacagaggaaccctggacggttgtcgtctctcgcatcgttgcagctggaactccttgcactctcgctgctggtaacgacggttctgaaggtctgttttacggttcgtccgctgcagatggtattggtgtcattgctgtaggatctattgacaacatcgaatcgcctgtcttcaccacctacggtacatacaggatcgataactcaaccactggcgagttcggctatctcgaggccgctattgggatgcccaacatcagtctccctctctgggccgttagcaaggacagtgctattgttgatgatgcttgcgaacctcttcccgccgacacccctgatcttgctggcaagctcgtactgattcgccgtggcacttgcactttcgacaccaaggctgctaacgtcgctgcttttggagcacagtacattatgttctacaacaatgccccaagtctcacatctgctagcgtttcataccctggcatccttggagctgctatggtctccgccgagcaaggtgcttcttgggccgcatctcttgctactgggtctgccattcaggtcactatcactggtgatttgaccgtcttctctagtccgcccaacaacattactggcggccatatgagcaccttctccatgtggaaccctactaacgaagcttacgtcaagcccgagatctctgcccctggtggtaatattctatccaccctccctctctcacaaggtggttacggagtcctgtcaggtacttccatggccactcctttcgttgctggtgttgttgccctcatgacacaggcacgtcctggccttgatccttacactattcgtgctatcctcggcaccactggccatcctgttaccttcaacgacgggaggactacttatgattaccttgcccctgttgttcagcagggtggcggtgaagtcgacgcctttgctgcggttcacacttctaccgtgatcgatgttgccaaccttgcattcaacgacacagcacacttcgtcaaggaggcaaatttcaccataaccaaccgtggtaccagcgagatcacctacgactttgcgtatgtcaacgccgccactgcatacactcttccagatgatggtagcacccagcctcagaccttccccccggaccttgtcacctctggtgcaagcgtaagcttcagcgctggtagtgtcagtgtcgcagccggaaagtcggagactgttcttgtcactcttgccttgccccaagatcttgcaaccgctcgcatccctgtctactcaggtttcatcactatcaacggcaccaacggcgattctttgaaccttccatacgctggcattgcttcctcgctcaaggatgctactgttcttgacgccagcactggatacccatacatcaccagcacctcagataacacctacgtccctctagatgccaacactgtcttcactatctctgttgcgaacactacaatcaacggcactaccgacaactcgactggtcttctgatacccaatctgagaattggcctcgtcatgccctcttctcttattcgtgctgatctcatcccctcgaacattacgtacggtacatacaccaacactactaccgttcttggtgtcaaaactcttggtgccattgccggtacaccttctgtttaccagcccagagccaacgcctggagtaccgccttttacggtgtcctcgatgatggcagaagagtccctgcaggaacctactcaatcctcgtccgcgctttgagaatcttcggtgacgccacaaatcccgatgactacgacagtgctgagactgtaccattcacgatcaagtatgtgcattga

SEQ ID NO: 2132 - DNA, 1532 bp, Aureobasidium pullulans
atgaagcttctcaagaccttcacctttttgcccttgctttgcttcggagtagaagccacggagcatcatggtacagtcgaactttctctcatgaacagtgtcggtaacaaatatggcgacgaatactatgtcaacctcactgtcggcactcctggccagctacagtcggttttgatcgacactggaagcagtagcaccatatttctggcctcagatgtgcctggctgcaacaaacccctctgcccacagactttcaatctgtccgcatcgtcatctttcgatgcagtcagtccgggagccctgtacgcaccctttggtggtgctgccgcactgggagattttgtcactgatgtggtccagattggtacgtataactccaagtattcgagtcgagactggagcgcgaatgcgttgcgtacagggagtgactactaatctgtcgtccaggcgatctctccattagtaaagtcccgctgggactcgcccacacttttcgatcacgtctccagccctatactggcatcctgggccttgggtactcgagtcgtgaggctatcaaccggacgatgtcacataaagtgccaaagcatccttcctttatcgaagtgctcaccaaagccaacgccatatcttcacgtcttttcagcgtccacctcaacaaactggatatgtatggctcaatactgtttggaggtattgataccgcaaagtatgagggcccactaactacactcaactgtctgaatagcaaacacgacgaagttgatcagtggtacctgaatctacaagaagtcactatgcagccccatgacggcccagagcttaccttactccgttcgactcaggacgaaccacgattcgccctagtagatacggggtctccagactggcagctaccatcaagtgcgtatcacaaggttcttggatttgcaggagccgaagctccggacggcctttggcctctacccggcttcaacaggccctgccgtcaagtggcgtacggagccgcaaacacgacgcacttccagctcacttttgctggcaatgggaccaatactgccacgctggatctcgagctagctgatctcttcacaccaatcactggagatgatggtagcgctacggtagaccgttatggccaaccgttgtgtatgttacgaatcgtagaagtggaggagaataatgagcctctgattataagcagtagtgtcatgagggctggatattgggtattcgacctcgacaatgggcagatatccctgggacaatctgaccttgagacgacttcatcaaacgtagtccaggttcaagctggcacagatggtctcagtagagcggtccaacggctcgttcccgagtctcaattgaatgatgtggagggtcaaatggccctcccatcgacctacaaattatcaaccgctacgaacaccatcggctacactactggcgcacaattttacccaagttcggcggctagacgctctggtgaaaatacaatgcggctggaaacacaacgaagaccgacgaagtaa

SEQ ID NO: 2133 - DNA, 1275 bp, Aureobasidium pullulans
atggtcctactcacaatcgccagcgtgctgtctctcggcctcggaagagcacttgcacaatctggagtcatcagtcctcttgcgcgggcatgtcctggatattcaaacaacactgatgtggtgtgcatcaaccgctatgcctcagctatgccgccttctttcgaacggcaaagctctactggaggtgtattctcgccaaacgacacttttgtggagactcaagtaccttccgatccgtctttcggtctggtgaagaacgcaacattcgtcgtgttcgaccagcgtggtagccaaattcttggtccctctcctaagctggagtctgtgtttgcaagccgcaatgattctattcatgaaggaccagtttatgttccttcgctggacgctatcattttctccctacctcaccaaggtatctaccagcaacagattattcatctcaatgattccacacctcgattggagaactataccacgactcctcctgtttatgcagtaaatggtggcaagctcttcaacggaaagatctactgggctgtcgaggcaggtttctcatttccttcacctcagaatggctcgctggtagctcaaagacctggcatctatgagcttgatccatctactggcgaggtcactactctgctcaacaactactttggccaagcgttcaacagccccaatgacctctgggtagatgatcagggtgacatctggttcactgactcgtggtacggttatgccatcaatgtcactgtatacccagtactccgacctgcaacctaccgcttcaggccttctactggtcgcgtttccattgtcgaggacagtattgctcaaccgaacggtattgggatgtcccctgaccgtcgcaccatgtacattagcgatactggcgtgaccgacttcgagaactacccagcggacagtcctctccctcgttacagctataacccactgggaagaaattctttgtatgcctttgatgtcgtcgcatcaccagtgggatcttacatcatcaacaagcgaccgatctaccaagcccagacgtttggagatgatggtttccatgtcgctcagaatgggtaccttatagcagctgaagggggaggtgttactgtcttgagtaaatacggagagatgctcttacgtatcgagactggcttcacagtcaacaacatacagtttgctggtcctgagagaaaggacctttgggtgtttggcgagggcgagattgctcgtgtgacctgggatttggtcggtatggcaaacgagtga

SEQ ID NO: 2134 - DNA, 2106 bp, Aureobasidium pullulans
atgtcgcagaatcggcttaccttctcactgcagaagctctcaatgtcgagggtgtcgctagtcactctcttcctgctttccatccttccaatcatttctgccaaccctcatgccatcagtgtgcaattgtctgctggagcagtatctgtcggaaatggcacaacaggaagagtcatgttcatcctttcacccaacgggacagatcctcttgacgacactgatgataccacgacacaagatttcttcttcggtatgaacgtcaacaaccttcaccacaacgacacgatcaagctttcaggtgggactcgagaccataccgacacaggcgttttcggctggccgctcgagacgcttaacgacattccagttggcaactaccgtgctcaagcattcttgaagaggtatgacactgccacacgtagcgatggatctgtagtgagactcaagtttccctgtggtgacggaagcccccctgtatctggggttggcgacttggcttctgacataatcgatgttcatatctcgggcaaggcacagactatcaagttgctctggaacaatacggtaccattccttgacttttcaggtcatgaggttggcggctgcgcccaaggcaactatgaagacacgcagtatctcaaacacatcaagatacgaagcaagaagcttagcgacttttggggtcgtgacatgttcttgggtgcgaacgttctgctcccgcacggctacaatgcccatgacaacgccactcgttacccagtcatatattcacagaatcattgggcagaaggcgatggaccggactcctactcgacaaaggtcagtttcaaggaggcatgggactcgggtgtcattcccgcatctggcaacaaaactagtcgcgagactccaaagatgatcctcattgcattccgtcacgaaacgccttattacgatgactcttacgctgtcaacacggcaaatcttggtccatatggtgatgcgataaatgaagagctgattccgtatctcgaagcacgcttcaacacgataccaaagccgtatgcccgcattcaggacggtggctcgaccggaggatgggaatctgccgcgaatttgatcttccgacctgaccttttcggtgcttgtttctcgtcttatcccgactctttggacttccacaaacatcaagctatacctttgtacaacggtacaaacgcatacaaatatcccaacggaagtgacataccttcgattcgagagttcgtcaatggtacgcagcaagtcttggccagcaccgccacggagaatcactgggaactgaccttcggcacctcttcgcgctcttctctacagtgggatatctggaacgccgtctttggtatacaaggtctcaatggctatcctctggagccatggaacaaagtcaccggagaaatctaccccgaagctgtcaaatattgggaatcaatggacctggctcatcatattgtcaccaactggaacagctccttgcgcttgggcgaagtcttgcgtgatcgtgttcacatttccgtgggaacatgggacgactactttttgaacgagggcgtggctgaattcaagagccgagtcgagacgctgggtggacaagactgggctacgatatccattcttccggaaaagacgcatggtggtttctaccgaggtatggaggcctgggattatcttgaactcgtcaaaagatgggtcgatgatcatgccccagatggagcgaccccactccatgccaacctgactttgggaacatcgcgcggaaacacctggagcgaggtcatcggtcgcggtggtcatcaagctgcactagctcgacagtctgatccagtcatcaaggtgactgggggtatcgtgggtacagtaggtagttgggatcctggcatgaagcttgttgcacgctgggtcatcaacaacaaaacgagtgagaagcacggatgcacctcattcaacgtcacacaaggcgatgtcgtccgatacaacactggaaatgccaaaaccaacaagaaggcagagcaggttcagttgtgggtgacgggacgtaagatggggtatgtcgaggaaaccagaaagagtaacaggttgaggatctaa

SEQ ID NO: 2135 - DNA, 7430 bp, Aureobasidium pullulans
atgcggcaaacttttcaaatttttgtgctgctgggttttgttgcgaattccttcgcttcgtcttctagccattttgctccatatgctagtgtgctcaatcatacctcgcaattgaagaaaagctacgattacattgtcattggtggaggaacaagtggtctggtcgtcgccaaccgcctcacagaaaacccgaacatcactgttctagtcatcgaatatggctatgtgtactcgacctcttcctccttgcttttttacctcatatcaagtactaatactctacagcgacggtcaagaaaacggaacaacggtgccaggtcttcctgtcccaagcaaataccttcgcacagataccagtatccctcaacctggtttgaacaaccgcacttctccgttgtatactggtgccgtggtaggcggtggtacggtggtgaatggaatgttctttgctcgtggatctgctggtgattatgatgcttgggaacagctgggtaacccaggatggggatgggaaggactgttgccttatttcaaaaaggttggtttaattgactgtgcagtgggagaaaggaattggctgctaacttgttctgcagagcgagactttcacaccaccgacagaggaattgcaagacatgtttcccggcgtcatctcctcagatctttctccccatggaatcgacggccccgtaggctcaagtttctccaactaccaatacccagtaatcagtaagccacacccctgctcctattcccttcccacagaccccacaatcaatctaacaccccaaccagaaaacttcttcgccggttggaacagcataggcgtatccacaaaccctcaaccaaacaacggcaaagcgatcggtgctttctacagcacaatctccgcatacgcagaaaatcaatccagatctacggcttcggatgcttattatcgacctattgctggtgtgagggggaatttccacttgcttactggatgtcttgttgcgaaagttaattttagtaagggtaggagggctgtgggtgttgatgttagtatctttctgatctcgatgtcttagatgatgctgattttgcatggatagtttatttctcgcgagacgaataagactagtacggtgaaagcggctcgcgaggttattcttgcggctggagctgtaaggagtccgcagatactgcaactttctggtgttggacctaggaagctgttggagagtcttgggattgaatgtgtggttgatttgccaggtgtaggaagaaattttcaggatcaacctacgatttatatgcaatttagctgtaggtgcctctttccttgcgaggttgatggggggcaatgttgatgagacgagtagatggcaactacacattcccaacaccagactggatgttctcgaatgccagctgggcggctgagcaactggacatctacaacaagaaccgcacgggtaagtacaaatcagcctttaccacaaaacacatctgacggtcgaacaggtccaatcaccatcccctacctaggaggcagctccgtcgccttcctccccctcaaaaacataactccctcctacccttccatcctcgccaccacagcactcacaaacctctcctccatcttcccctccacaattcacccttccatcctcacaggctataaagcccaacatgatctcctcctctctctatacgcctcccccgacgccgcagtagcggaaatcgcctgggaaggcggcaacactatccctctcgccatgatccggcccttttcccgcggtgcgatagaaataacaaccaccgaccccttccacccccctaccatcgatttcgggactttcagccatccgactgatatactgacatccatcgcctcgatccgcaaactccgcgaatggatctcttcaccagccatgcaagccctgggcgcagtcgaaacctttccaggcgccagcgtttccacagatgcggagatagaggcggcaatcaggaatgcagcgacgagttcgtggcaacatcctagtagcagttgtgctatgatgaagaaaaggtggggaggggttgtggatgctgaggttagggtgcatggggtcaaggggttgagggttgtggacgcgagtgtttttcctatggctgtggcggggcatacgagtagtagtgtttatgctgttgctgagaaggtaagtgactgcgctgatatggatctggtgagggagatgctaacgtttgtgtaggctgctgatattatcaaattgagttgggagtgaggttggtgagaaatggtaggtgaggcttgagagatcattgattcgatgcagatttgatgggataacttttcctcgtggcgaaaggcgatgggtgttggtattactatgattcgggctgatgctttgtagtgtaaggttcggctatctcatgctttgcttccggcgtgatgttagaccaccttccttgctctccccccctcctccttatccttctagttgtttttcacctgtgtaatgtcttccttagacgccgaaatcgcacccgagaggaaatgtatggtaagtttgatgtgtgttgcggtgtctgttatgattaggtggactaaatcgttgtccacgaaaggagatggtttggtacgactgtctgatttcctatgctcgtgtgtgatgctcaggtatgatatgtatggctaacgacgctgatatctacctatctgacaacagctcccgctagtagtatcacatataccagcatcagcacgagcgtcatacgagagacttttaccacaacctcgacagtgatcagtagcgccccaggacaaaccagaacctacttgacgtaagcatgatgaacccctatcctccgagaacatgacagacctttccctccaagagcttatgcaattgaatgttgtgctgcttcggcactgaatcccttctatcagactttgggtgttttcaactgacccactcgtctggttgacctttctaatgggtctgccttgctcgaggctcccatgagatccataattcgctcgttggctttgtcacgtaattctaaaagcctcagcgcgacttttgtacggtcgaacctctcaagaagatgagcgagctggtttgaaaaagcacttgatgacttgagagagatgagcggagcagctgacgcctcctaaaccatgttgagcgaacttggctgacttaggcgtttcagaacctttttgaccacggtctacagcacaaccacgtctgtcagcctatccatctcaacgcaacctgcttccacatttacgacaacacagagcctgactcttactgcgacagccactgcaacatcgttgagtttgagtctgagaccagcttctacagtggtgcaaatctcgacgacgacggcctactcttacataaccaccaccagctaccctgttgcctcaactgtgacgactaccagctacgctccacaaacaactgtgtatgctcctccgtcgacgataaccgttactgtgtcgaacagaggagcggcaacatcttctgccactccatcctttgctttcacaaccagagacttctgtcccgcgattgatgaccaagatatcgccagctcaaacggtactccgtatactatgcactgtgcctcagacaccaatataggatcatttgctgatgctcgagccggatatggatacggcgattgtctcgatgcctgcgatcgcacacctcgctgcgtagccttcacttatggtgagtgtttctcctaggcgagctgtacagatctagcgtcacaagactaactccaaacagttggatccagttcggggcaggcatgtgagttcaacatctacctttttccgacgctgttgttttgaacgctaacgaaattcaagcggggacgtgttatatgaaagatcaggtgggtctggtacaagcaaacgccggcagcaccatcgttggtgttaagaaagtcgtatctgctccttcttccgcagctgcgagttcaagttcggtcgccccacctctccagacagctcccgtccaggaagattattcatgcccggaaaatgatcgacagcgagtcatcgataattatggcggtgtgtatacgctcgcctgtagcagcgacacttctggaggtggagcttttgctggcgactctccggacttcaatggctgcttcgaaaagtgcgacagcatggtgaattgcgttggcttcacctatgatggtaacaactgctatctcaagacgggggcagcaaattccatcagttttgtgcctgcagcttcgaatttcgtcggtgcgatcagaaatatgccctcggatggcaattcgtatagcgtgactccgagcagcacacctccgcagactactactgtgtatgaaacacagacgcagttcaaaactttgacgcagacacaaacagcgtgagcatctcgccaatcactatgctatagttggttctgcaagactgaagctgacatactttgtgagtacacggacaaccacgcaggtgatttatccagccaccccagcgcccgtgacttcgtattcgaccataacatcaactgtgtaagtggatcttgagatcgtgcaggcagaaatattcatattcgaaatgagaccaaggtatattcaaatgaataacatgctaacacacattcgcagcacctcgactgctacgccgcctccagcgagcacgagcatcatgtaagggaagctgcaagtcgcttcaaatgaagcatactgacaataatactccagaactacgacattcacgagttatgcagcaacaccgtctccagtcacaatgtaagcttcagctgcgagacctgttctgtaagcattgaaatactgagatcaccatttagcgtctccacaaccacttcgacgatttatgctgcaacaccctcgccgctgacctcgactgtctatgctgcaacaccctcgccgctgacctcgactgtctatgcagcgacaccctcaccgctgacttcgactgtttatgcggcaacaccctcgccatccaccttgacagtctatgcagctactccatctccctcaactcagtaagacatctcacgtcttttaggtacgaaacctgctaatcagatcttcttaggaccacgacctccacagtctatgctgcaacaccatctccagtcacagtgtaagtaatactcgcgatgaattgtttgaatgtgcgatggcagctaaattgatcttctagcatctcaacgaccacttcgacgatttccgtttatgcagccaccccagttccctcaacctcaactcagtaagttaggtccaaactaaatccagctcaggttgatctataccgcaatagtggcttcttgggtccatcgcagatgaagaagtagacagtctacttttgatctcgcctgggcttaatgacgattcatcttgactattcgatatgtagaatgatatgctgattgaacttcggtaggactaccacaatagtgagctcgttcacagcgacacagacgactactgctccagcaccgcctcccaatactgtgtaagtgatgttcttatccagtctcataacaattggttgcagggttgctgatattgtgccataggactgcgacgaccactgctccagcgccgcctcccaatactgtgtaagataactgtccaacctgcccgaaagcaattcgtcggagcggatgctgaaattatttgctagaactgcgacgagcacaatctatggcccaactccagcaccaataacttcaactcagaccttgtgagtattgtatttttccagtgcaaaatttgacgggccagaaatcacttgtctgattttctgttctggaccaatctgcaacgggggtgaaagcatgagctaacgaaattgcaggactaccacaagtactacaactcaaggtaagattgttcgaacctcaataaccagcgcagtccgcaaggatatcccggtagagccagcacgcctcctcttatcgtctacaatgagattcgaactcggaaacattcttgcaaaaaaagaccctcgatctggctatgaagagataacatttgctgacctgcatattttctagtggtcactgtgacatcgacaccgccggctgtgtaagtcgtttctgatcatctcgtctgtcgctagagaggctagcaggacggaagatacttagcaatagttatttacgataactgattgatttctactcacaggacgaccactgcgcccgcacctcctgccagcactgtaacaactactgcaccagcacctccagcaagtactgtgacggttacggtgacaccagtaagttcaggccgttctaatttctagcttgtgtctaatgcttatgaaagcgttagtcctctattacgagcgtgacagctgcaagtccagcagcgcaaggagcagtgagttgattctcctctgggactcaacctagaccagctttatgaccgagaatactaactgtatcatttcagactactggctcccgaacaacgacaccagtggtaagctgaccgttaaagaaaagacaccgccaaattttcgctgactcttcccaaagtcaacaacagcagctcccacagtcgctctatcgtcccctactacaatcataagctcagctgcaaaccatgacgacggaatcgttgcccgtgtcgtgcccttcgcaatttccatctgcggcttctcctccaacaatctcaccataagcaccaatggtgttctcggctttggcataactagttcctaccagcctgccgctcttccacaatacacagctctctcccccaccggctacgccgtcataccattctgggccgatctctacattgctcaaggaacatcccaaggaatctactatcaagttgatggtacagcgggctcacggattatgacttttgaatactacgcgacatactacaacaagacatccaactattatcatttccagattctgttctacgaaaacaacccaaaatctttcacattcaagtatttgaatgttacggacaacggagtcaatgccgtggttgggtatcaatgtcaaccaagtacgcaaaagcccgctgccatagcttcgaagagcagacgctgacgtttctcagactccaaattcaagcagtactcggccaaacaagctatcatcaccggaggtttacaagtggactacagttatagcgcagacactttcacctctggtagagtgccaagtcgagttgcaatgattggcctaatgattgatttcgttaatcgcattgtcgacaatgtgtcgagttcatggcgagcagcgacctcttggatgcgggataacccttcgagtacgccgtcgaacgaggtctacgccccaaagccgtcagtgacctttgaggccaacattgaggatagcatcaaccggaggtgggcaggtgggtatagccgccgtgagaactcctcaaccttggcctag

SEQ ID NO: 2136 - DNA, 2046 bp, Aureobasidium pullulans
atgcgtctgtcgacttttctattgctggcagcagccacggcggccgttgcccagaataccacccaagtctacgattatgccattgcaggcgccggtactgctggtctacttctcgccatcgtcctgaccgaagatccttcgatcaatgtcgcggtcctcgaagctggctcggatggtcgcacgaaccctaatatcacgattccggagttgagaggcgagatcattgataccgagtatgattgggcgtactacagtactgtacagcctggcttgtatgagaacaggagtcaggctgtcaatagaggaaagaccatcggtaaggcacatttgcattgttttgatgatatgtcctgatggcgcccaggtggaacaagcgctatgaattggatgattcataacgaagactcgcgtatacaacttgatatctgggagtcattgctcaacctcactagctggaacagtgatgcatcactgggctggaattgggagacactatccaccgctttccgcgagagtgaggtcttcttcgctccttcctccaatgcatcttcggcggagcaaccggaccctaccaaccacgggtcttccggatacatctgctcgaccttgcaacgcagtgtcctatctctgctgtccgactacgtaactcctgctcttctcaacgctggatatgctgtccccggtgatagaaatggaggtaatgtgactggtgccgggttacttcctcttgctatctgccccggcaactacaccagaagttattcgggatcagcatatactgctgtccaggacagacgcaacttgcatctttataccaacgctcaagtcacgaacatcagctggatctccaccacaactggaaatgttactgcccgtggactcaattacgtcgacacttctggccgtacttcaaacactagtctctcaatccaagcgcaggagattatcttgtctgcaggtatagccggctcagcacctatcttggagcgatcgggcattggtaacccggacattttgacaccgttgaatatcacacccatagtcaatctcagcagtgtaggcactggactccgagatccattgatgatgcaataccagcctctccaatacaacttcagcgttgagttcacaggtggcgagtatgctcagaactacattgacctgcgtcctgctcaagatgtcctgtcacctgccgactataatgctgcctctgtctggttgaatgagacgacatctattccgggcttggaagatgcacaacttcttgttttcaagcatctttggtttgcccgccaacctctgattgaaatggcatggcagtacagcagcacgcaatccatgccatacaccctaatccctctctcccaaggaaccgttcacatcaatacctccgaccctctagccgctcccgtcatcgaccctaattataattcagtgactgcgatcataaacaatgagacagtaccctgggatctctggctcctctcccgagcttcacagttctacgtcacacaactggcaaacagtcctcctttctcagacgtcttgaccaaaacagaccccgaccacaacctgtcacctgccgattaccaacaagccgtctacgaacgcacaggcacatctcaacatctcacaggcggcctacccatgcttcctcgttccgctggcggtgcgatcgcctccgaccttctcgtctacggcactcaaaacgtcagagtcgtggatggcagtatcttcccgtaccaaccttctgcacatcccatgggattgacatatgcggttgctgtacacgcggcgaaaatactccagcgagctagagggaccaagttgacatatactgaactgcctggagtcagcaactcgagctcgaatgctacggctgtattcccgacgaacctgccgactgcgacttatgatgttagaggtagtgctgtgcctgctagctcttcggtggtggtttctaccggcggagtcgagaaggtggaaacaaatggctgggtcatgggcatcagcatgatggtctttggttggaacgtactgatgtag

SEQ ID NO: 2137 - DNA, 1243 bp, Aureobasidium pullulans
atgaaggtcactctttctcagctcattgctttggcaactactgccagctgcactgtcatcgatctcgacaagagagcttctccgctcgatgtcaccttgactcctctcggaaacaccaaggtcaaggctgctgtaaccaacaacggtgatgtcagctacaacctcttctacaagggaaccttcctggacgaggcccccgtcgacaaactccacgtcacctctgctggtaagacattttgggccatcaagtttcaagtcacacccactaacagcaggaattagctgccaaggctcccttcactggtattctgcagcgtcttgctactactcaactcaccgaggagtctttcaagcccctcatggctggtcagactattgaagtcgaagtcgagctcgccgaactctacgagctttccaccagtggagcatacagtgtccttgctgccggttctgtcccctacgccgagctgaactcgactgttctgtctggaagtgccctctctttctcgagtaacacactttccgtcgatgttgacgctgccgaggctgccaaggttgaattcgccgtcagcaagctcgagaagcgtaccgccatccaaagcgattgcaccggtaccaagttgaccgccatccgctctgctttgagcaactgcaacagactggcaactgctgccgcaactgccgcaacttctggctctgctagcaagttccaggagtacttcaagaccacctcgtctaccactcgcaacactgttgctgctcgtctcagagctgttgcttctgactgtgcttctaccaccggcggcaagactcgcacttactgtatgtttgacctcttcccatgattttctgaagaacacgagcttacaagtttctaccaacaggcactgacatctacggtggctgctcatctggtgttcttgcttacactctcccctccaacaactacatcgcctactgcccccttttcttcagcgatcttcccggcctgaccggctcctgccacgctcaggaccaggccaccaccgtcctccacgaggagacccacgcccctggtgtctacagccccggcactgaggacaacggttacggctacagcgccgctacctccctctccagctcccgcgctgttcttaacgctgattcctacgctctttacgctaacggtatgttaccacgagttattggacttattgatgatgtaatgctaacggctttcacagcaatctactctggatgctag

SEQ ID NO: 2138 - DNA, 2439 bp, Aureobasidium pullulans
atgcgatctttcttcttgctttccaccgctgcggcgctggccttcgccactccagtgccccagcaactggatctcagcatggccgatgctattcctacacctgagaatgtcaccgtcccttctgacgtctcgtcacagactgtggagtttgatatcgatgccgctctggaagacgcaatcgtcgcagtactcactgacgacaacaccattgacgtctcggacagcaccgctgacccggtcaacggtactactcctatccaaaagcgtgcggcttgctccactgtcgcacttggatctggacctactccaagccccgatactgcagccgatttcttgaagctcgccagcatctccactgccgccaatggcgccagcgctccgtccggctacaccgagtctttcaagaacgtgaaggcagctgccaatgcttatggtatgtaccatccagtttcctaaaaatcaggcagtcactgacaatatgaaggttatcttggatttaccacgctcacttcttacaacgtccaatcctgtgccgataagtgcgacaagatcaatggctgcaactccatcaacatctatttcgagagagatcctcagaccgacccaggcaacgccgagtgcaagaacaacaaccccgccagcactacaaacataaagtgcattttttggggtggtcctgttaccacagagaactcggtcaacgctggtcaatggcgcagcaagtttcaagtcgtcatcgctggtgccaatggctatgtgaagaatagtatcgccactcccacaggatactcttcatcagcgtattacggagctgcctccatcgacgctccgaaggactgcaacggacaaagcactttcatcacctcgaaggtctttacaggctctccttttgacgctagactctgcgctgctgcctgcgatgctcagaacatcgaccatgccaaaacaggtgcacaacaatgccgctacttcaacacctatattctgtctcgtaacaacgttgctctcggccaatactgtaacctctttactcaagcttggactgcttctcaggccacttacaagggcatcaccagcggcgcaaacaagtacaccatttcttacagttttggtgtctccgcttcgtccgatgctggcaactgtaataaggaatcttctccgccaaccagtgatactggcaagccgcctgtgactggcccatcgactggtgctgatgcgttcatcaactggaagaccttcaaggccaatggcgtcaacctgggtagctggttggagaaggaaaagaaccatggtgagtttatgctcctcacattcgattattcgagacatgtgctaatgatgacttcaagacacattctggtggaacagtatcaacgacgacccttcgatcatggacgaatggagcttgtgtgcctcacttggtgctcagtgcggacctgttttcgaggctcgttacggatcgtacgttaccaaagctgatattgacaagttgggagccgtcggtgtcaacaccttgagaattccaaccacatatgccgcctgggttaaggtacccggatctcagttatactctggtcaacagaaaacatacctcaaggcaatcacagattatgctatcaagacctacggcatgcacgtcatcatcggactgcactcgtaagtctcctcctgataaagatagttaatagaaacctcgctcacactagaattagtcttcctggcggcatcaacaacctcgacatcggcgaagctttcttccacaaagaatggttctacaacgagaccaatcttgcctactcctaccaagctatcgatggcattctcgacttcatcaaagcctcaggaaatctcaccgcatggacaatcgcccctatcaacgaggccggcgatgatctctccaaattcggtggccccaacactctttcgaccgcggcagccgactggacaggcaagtacctcaacggatgccttgatcacatcgccaagctcgacaaacgcatccccatgatggtgcaagatagtttcatgacacccggcgcgtggtacaaatactttgacgcctctgccaacgtcgtcatcgacacccacgtctacttcttcgccgtcgccggtgcctactcccaatacacacccggcgctgtatgcggacaggccaagtggatctccaactttgacaaattccccaactttgttggcgagtggtcgttgcaaattcgcttcaacaacaccttttctgaccgtgagaacaactttaacgtacagaggtttgcttttgacaagtatgcttctggcggcgctttctggaatgtacattcgcacagtgctgcggctgtcagtggagagggcacgcagagagattattggtcgtatgttgatctgattgatcagggagtcgtaaagactattgatacttcttatgcaggttgtgatgctctctga

SEQ ID NO: 2139 - DNA, 4947 bp, Aureobasidium pullulans
atgccgcctacggcatcacgatccagaatgggggttctgcctctctttgctctcttctcctccgctctagctcagagtataccaggtgcaagctacttcactggtggtggtgtccctggctctggagcataccagctggttgatgactaccagcccagtgtgtttttcagcaaattcaattattacaatgtgggttacctctaagatcacagcgaagatcaatgctcatctttcgtagtcttacgatcctacctatggtcatgtccagtaagttctaccaccatccatctacaaagtagtgtctaattcgtatctccagatacgtaaatgagaccgtcgccaacagaaatggctacacgacaacagatgatgacaacatcacgatcagcgtcgacaccacgaacaaatggccgagaggtggccctggaagacccgccgttagactcatcagtgacaacacctacactcatggcctcttcattctggacctcaatcatatgccctttggttgtggaacatggccagctttctggcttcttggaccggactggccacgcaatggtgaaataggtgagtgtgattctctgagccctcttgaatcccggctaagtatcgttagatatcattgagggtatacacaccagtactacgaacaccatatccatgcacacagactcgaattgtacaatcgctgggtcaggacagaccgggttgttcacaagctccaactgcgatcatgcggcgaacgacaactctggatgtgggagtgtggcaaacaacactgctactcctaacaactatggtaaagcacttagtgacaataacggcggtgtttacatcaccgaatggacttcagcatatgttcgtgtttggttcttccctcgcaacaatataccttcaagtgtcacaagcggttctcctaacattactcaattcggattacccatggcaaatttccaaggctcttgcaatattgattcccatttcgccaatcacagcatcatcatcaatactgatttctgtggtgcttgggccgggttcacgtattcgaactacaaagaatgtccattgacgactggcttgaatggctatgattcttgtgtcgactatgttggcaataacccacaggctttcttggacgcctattgggaaattaattcgctcaaagtctatcagctaccggtcaacgtggattcgtctactgttcgtaccagcacggcgccactgacatcctcttcgcctatcagtgccagtaatagtatcatcaatcctggcatgggtcaatccacatcttctctacctctttctgtaccctacagcggaccactttcttctgcttcttctacaagctcgtcctcggccactgcctcggctaccccaatcgtatgcccattgtacggcaacagaccttggacggactataaaggagtatcatatactatcagctgcggatctgacttcactgcccaaagtctgaaccaggacgggcagacagttgacagctttgaagcttgtatcgagctttgtgatggagttgatggttgcagtggagtctcccatcttggaggcaatggagctggaacttgtgtactgaagacaggcaccggcgatcttgtctacgatggtcatacttttgctgcggtggcgatctcaggcaaatccagcggctcctcgacaacattgtctacgacgtcgacaggctctataccatccacaccacccaagactgccacacttcgccctactgctcagccatcgacttgcccagaagccaataacgccgtgtacgtcgacgagaatgtcatcaactacaacgtgtattgctctgcagatactgagattggctccttcaattctaccgatatccatggcggcggtttcacggcttgcttcaccatttgcgatgttacgccggattgtgtcggattcacctttgtcggtgcgtcatcgggcacttgttatttcaagaaccaattcggtggaactttgtcggctccttccaacttcgttgtcgcttttctcgctcagggtcaaacttcaggtagctcatccttggctcctaaaacttcatcggtggttctttcgagtgttgcatccgttccctctccttatagcagcacgatctccatttcaacacgcagtagtgtattgtctgtcggaagctcgcttgtcagctcgagtctccttgctagcacgacgagtgtttcgtcatctccgtcatcgtctctggcaacatcactgtcttcttcgcggtcatttgcatcctcttcaatacgggcctcgtcttcacggccactggagtctttgacatcttcgtcttctaccttgcagtcgtcggcgtctctgacatccttgacctcttcatcagttccatcatcagcatccagctcgcagtggacgacttcttccgcgattcctcaaatcgtctactatgtcgccccaccgtgtccttcgaccgcagacaacatctgcaactccgatacaccaacgacgtgttcgaacgctcgaggggcaaatttcaatgttggatgcggaaactcctacactggaacgacgatcgacagcaacgatgggattaacagattccgcatcatgaagcgtgttaccgagccttcgtacacagattgtcttgatctttgtgacgacacggatgggtgtgtgggagtcaactacaaaggtgatgagtgtactctgttcagtcaaatcactggcactatctctgacccaggaaacatcgccgccacactcttaccgccagtgccagtcacttcgacggaagctgctacatcgacaccgactgcctctgctcttccaacttccagctctgcctccgcatcactgccatcgatgtctgtgacttcctcgagcgtgacgtctagcacttcgttcacagcgattccgtctgcttctagcctgacgtgtcctgcatctgctgggcagaatgcaacagattcgaacggaacaaattataccatagcttgtggcttcagcgttcagggaggcgatcttgctagtccgttccgtgctgtctctgtcttagactgcttaccaagttgcgatattacggccggctgtattggtgtggcctacgacacgtcatcgtccttgtgtcagttgaagtcaaccttcagcggcactcgggtacccaatgcaaacttcatcatcgcggtacgggcaggcgcgactgatcctggtatttcgtccttatcaggtgcaacaagctcttccacaacatcggttcttagttcctcgagtatcatcgccagtagcactgctcctgttacaatcacgacctgtgagttatcgaacttatttgcaagctctctcgttcttactgactgtcttccagcttactctgcaagtgcaactgtcactgttgtcagtacatacattacgactggagttcctcccagcggcagtattgcaactggcagcgaaagcacaggatcgggctctttgtgtttcacttgtttcttgacgcctactgtgataacgggtggtggcagcttggagtctcctccagtaaagaccggtactggcagtgggagtgtatgctctgccccagcatctggctccgttgaaaccacaacggtcttcaccacggaaacagtcactgcttgccccactccaggcatgtgtccgccagaaggcttcggctggtacggtacattgtttggttccaacttcagtagtttcagtgtcgctcctcaaagctcttttgtctcgagttctttcacctctataagtggaagtataggacctgtcgcaagcgcgggatcaagcattcctccttctaccacaaaattcggcccgtctagcgctgtaccaagcggtggggcctcagcaactccgatttgtcctggctcaaacggtaagcttttcactgacagcctgggtcaagtctatgagatcggatgtgaaagatacgtcaccgaccagacagtgtcgacaacgaatgtgagctccctcgcgtcatgcattgatgcctgcgacatgtacaatctcatgagtttcaacgcccccagctcctgtctgggtgtttcattcttcacgaccctcagtatggataactgcgagctgaagaatggtttcattaacgtgactacacctggagttgattctgcacgcctcctctcgagatctgttggctcgggcaacggcacatcaggtaccggcggatctggaggcaatggcgactatggcgctggatcggcagttggcaccttcacagcgacagctaccagccccgacggctctggggctggaaatggtgctggaggaaccggaaatggctctggaagtggttcaggtggaacaggctctggtgggtctggtggttctggaggcactggaaatggttctggaaatggaccgaacactttaccaggaacccagccaaacacgttaccgggcactggtccaggaacaggcctaggaacaggcccaggaacgggtccaggaacgggtccaggaacggggccggggtctactgtttacggggtttcgactgctgtatcgacgtttgtttcgaacggacagactgtcgtttcgacatacggcgtcagcacagccatcagcgtggtttatcagcccactactcaaacagtgaccacgaccagtatctccatctcggtttcggtctccgagcgcacgatagtcagcaccgctccgggtgaaactgtctcagtaggtggaggcaccggaggtggaggaaatggtggtgtggttaccatcacagcaggaggtggtaactacatcactgttacgcaagtggtcacgagctatgcgcaaccaacgaagagcagttcatctttcacctgtaggacgtacgccacgaactacctcaatggtatgcatgggaggaagttggcgaaaagaagaagcgtgtttgacaagcatggtatgggctccggccctctggcaccaatgccgggagcagtaccatga

SEQ ID NO: 2140 - DNA, 909 bp, Aureobasidium pullulans
atgcacttcaccagcatcttcctcggccttgccggtcttctggcctgtgccagcgccaaacccgccaacactaccgcatacaagcactttgaatgtggtgttgacatcagccgcgccagtgcgcacttcaaccagaccatccgcgccatgcaccagggcgtcttcaaggcacacagtggaacacagatcgccggtatcgttgcacgcgctgctgcagctcaacccatagctgttgatgttgctttccatgtcatcactactgccgcaaaggagggtactatctctcagaagatggtcgacgaccaatttgctgccttgaacaccgcctacgctcccaccaacatccaattcaagcgcgttgctaccacctacaccacaaatgatgcctgggccgtaggtgcaggctctgatgccactgccttgaagactgccctccgcaacggcacctacgctacactcaacgtctacttcttgaccgacctcgctggcagtatcctcggcacgtgtagcctgccttcaaacatcggtcccggcacgcctgatcccagcacatacatcggtgatggttgcatgatccaggccaacacaatgcctggcggtaacatctacggcttcaaccagggcaagaccaccgtccacgaagtcggccactggatgggtcttctgcacacctttgagggctacagttgctcaggcaacggtgacttcgttgccgacacacccatgcagagcaccagtaccgacggttgcccgtccaagccggcaaaggacagttgccctcagaatgtaggcgtcgaccccatccacaactacatggattattcagacgatgcctgctacaccaacttcactcccggccaaaccaagagaatggccggcatgtgggccgcttacagagccaatcgctaa

SEQ ID NO: 2141 - DNA, 1089 bp, Aureobasidium pullulans
atgagattcaccacttctaacctggccatcctcggcggggcattttcctacgccacgctcgcggccgcacagaacctgtcttacggcgccgacaacttctaccgcagcgacaatgtcacgctatggccggtcactttccagactcagtaccgcactgaagtcaccgccaatctcttccttcccgatttcttggattacaactcgactcatccagccatcgtggtcggtcacccaatgggtgctatcaaagaacagggtggcaacctttacgctcagaagctcgccgagcagggtttcgttacagtcgccattgacctaccattctgggggggaagtgaaggcgaaccgcgtcagctggtggcgcccgacgcttacgcagaggggttcagcgctgcggtcgacttccttgggctgaggagctatatcaaccgtagacagatcggcgcaattggcatttgtggcagcggagggtttgtcatcagcgccgcgaagatcgatccgcgcatctcggctgttgcgacttcgacaatgtacaacatggggaaccttaaccgcaatggcttacagcattccgtgagcgttgagcaacgtaaacaggtgattgctaatgctgcagcgcagcgttgggttgaggcggagggtggcgattacatctactctgaaggcgctccatttgagatcaacgaagactccgatgccgtttcactcgagttttacgactactaccgcacctcacgcggtctgttcacgcctgccagctctttcccgaaccagacttccgaccgcatcttttccagcaacacgaggttcataaacttctaccctttcaacgacatcgaaactatctccccccgccccatcctatttgtcactggggatcaggcacactcgaaagaattcagcgtagacgcttacgcccgcgccatggagccaaaggacttgtactgggtccctggtgccggtcacgttgacctatatgatcgggttgatctcatccccttcgccaagatcaccgacttcttccgaaccagcctcgtcggcaactcttcagttccaaccggcaatgagacggtagcaagaagattctag

SEQ ID NO: 2142 - DNA, 1571 bp, Aureobasidium pullulans
atgcagtttctcaccacattccttttgctgtgcagcactcccattgtacttgcacagcagtatgccggagacgttatcagtgccaaccttccgaccacagcaaatgcagaggttgctttcttcaagattgacgaccctagtggcaagaacaacaatcttactttgatcaactactactctcacggtaccgatggaaatcgtatcgtcgaaagtaagatccagagagctgtcattgttcttcatggtcttttgagagatccctggaactatgagaatgacgtaagtttcttgagaacatgttgagagatcaaagctgacaaatttggcagatgctcaatgctcttgcaatggtccaggataccaacgtcaaccgcgacagtgttgctgtgatggccccatacttccccaatggcaatgacaagaacctcggatacccttggactgatggtctcaaggctggtcaaggatctacatcaaacgcaatggtctggtctggctcaaaatggtccgctggtgcaaacaaccaataccctcacaacagccgtaacacttctagttactacatcctcgatgaactggttcgctactttgacgacaagacgctcttccccaacatgaagcagatcgtccttgctggacattctttgggcggacaaatgctacagcgctatgccgcagtcggtgacaagcttgatacagaatctcctgttgttctatggattgccaacggagactcttgggcatggctcagcgattaccgccctctgaacattccggattgccctacctacaacgactatcgcgaaggcttcgctcaatttgttgagtacggaatgacctacggtgccaacttggtcgcacagggtcttgacgccatcaaggcaaacttcgacagcaagcagattgcctgggctcgtgctcttcaagactttggagaccacgcttccagctgtgctcctcaaaccaccggccaggaccgtaatgagcgtttcttcttcttcatgaagtggttccagcctagctgccctgacccttcgggtaccaactgcgacactgttgacctggtcgatgctcctcacgacaatggtcagatgtttcactccgctgcaggacttgctcgtctgttcaccgacaacttctacggtgacaacagccgtgcctacgactttggataccctcgcaagcaacagggtgatgaccctttcccagaccccagcctcgtcaacactcctggcacaagcaactacaacacgtatgctggaggcttgacctatcagggctgctggaccgatcaagctccaacgactgcacaagcgctctccactctcctttacgacaactcaaacaacaccattgaggcttgcacatcaggatgcgccgactctggctacaaggttgctggtatgtcagacgcaaccaagtgctggtgcggtaacgaggtcagctctgcatctgccattctcacagtcgacatgcaatgcaagtcgccttgccctggaaacactgcccagatttgtggcggaatccagcgtctgtctctcttctcttctggctatcccactttcgtttaa

SEQ ID NO: 2143 - DNA, 1362 bp, Aureobasidium pullulans
atgaagtcttcactcgtcattctctcggccgcctttggcctggccgccgccgtgcctcgccacaaccaccatgctcaccaccagcaccaccaggagatgaagcgtgatgatgctaccgcaaccgagaacgtcgacgtcttcgtcgctggacccacggtcgtcatgtactcgctcaatggcaacatcatctccgagaacgatgttctcgagggtatcaagaacggcaccctcgtctgggccaacggtgctccctccctggccgacccctcgtcctcggccgttgcttctacctcgtctgccgttgctgccgccagcaccaccttcctcacctcgacctcgtctagctattcatcctcgtccagctcgatcagcttctcgaccagcaccagtgtttcgtcttccaagcagagcgcaacctcgtctgccgcctcttcctccgcaactggtcttgacaccaccttccccgatggtgagattgactgctccgacttcccttcggactacggtgctgtttctctcaactacctcggcctcggtggctggaccggtatccaatcccctggctctggaagctcccttcttggactcaccaacattgagaccgttaccaagtcaaactgcggtggcaccaactgctgctccgagggcatgtactgctcgtacgcctgccctgctggttaccaaaaggcccactggcccactacccagggcttgaccggtcagtctgtcggtggtcttctctgcaagaacggcaagctccacaagaccaaccccaactacaagaccctttgtatcactggttcctctgaggttactgttcttgttcgtaacgagatgtccaccagcgccgctgtctgccgtaccgactaccccggtaccgagagcgagactgtccctgtcactgccaaccctggcagcgttgctaacctaacctgtcccgatgccacctactacgaatggactggcaagaccacctctgctcagtactacgtcaaccctgccggtgtctccgccgaggacggctgccaatggggttcttctgccaacccttggggcaactacgctcctctcaaccttggtgtcggctactccaacggtgctgcatggctcgcaatcttccagaacgctcctaccaccaacgagaagctcgacttcaccatcaccattgagggtgacaacatgaacggttactgcagataccagaatggacagtactgcagtggcaagaactacgactcttgtagttcctcctcgggatgcactgtaagttcagcttatacgattttgcccttgattctttactgacattgttaaaaggtttccgtatcctctggaactgcttacttcgtcttctccaactag

SEQ ID NO: 2144 - DNA, 1466 bp, Aureobasidium pullulans
atgcgtcttcttgaagctgctgctcttgtagcctttgcaccacccatcgccgctcgaggcaacttcgactttcgagtcagtcaaccacgtcgtcttgtagccatcaaggagcctagtccgaatcatgtcaccagcaacacgatctcattaggaagagccgactcgaaaagcaactctctgagtgctggataccttcaagctattagagcgggcaatcacgtagatggaatatactcacgactgagagtaagactgaaaatctaccatcatcagctttgaacaagtactgaacaagtcatcagaatggaacagcagatctcctctcagtaggagcgggaagcgtcttcctcgctcccctcgatgcaggcggagagaccttctacgtagtgattgacaccggcagcagcgacacttggctcataaacagcgccttcacctgcgtggatcctacagactctgccacaatccccgaagaagattgtgcttttggaccaacctactctttaacctcaacagtctctcaaatcgacaatcgcaatttcaacatttcctatgccgatggagaacgtctcaatggaagaatgataacagaagatctcacattcgccggcataaccgtagaaaaccaaacaatgggcctagtcacagaagcaagctggtacggcgatggtgcatcttcaggcctcctcggactagcctactcaacactgacgaatcaatacaacggcaatgaccccaccgccgacatcagaggcgtcaatattccctataaccccctcttcacctcaatgtacgcgcaaaaactcaccgcaccactcttcagcatcgccctcgatcgcgacatcgcccgctccgctcaagcacgcggtggcgtcctagctgtcggtggtatcccaaacattccccacggcaccgcatgggcatctgcgaatatttccgtggtgggcatcgatgccaccaccggccagcccgaatatcaattctactccatccgggtagacggatgggcgatctctgcaaattggtctgcggatttcgacgtcaagatgactgggaataagaggaaagtgcagctgctgggtgcacctagtagaaattccatcgtcgactcggggacatcgcttatttatgctccttccgccgtcgctgccgcagtggccgccgcattttcccccgccgcctccatctcctcacaaacaggtctgtatcatgtggattgcaatgcgcgagtccctcgcttcggcgtcaccgtttccgcaaagacgtttttcgtcaatagattggatttgatcattgataccggatatgggttttgtgtgctgggggtgcaggataataatggtgggatgactatattgggggatgtgtttatgagaaatgttttgactgtgtttgatgtaggggctgggcaggtgaggttttcggctagggagttgcagttgacgaatgggactgttacgcagtga

SEQ ID NO: 2145 - DNA, 1656 bp, Aureobasidium pullulans
atgcgttcgtcaatctttgctgggttggttggtgtgtctgctgtcggtgctgttaagcccttggtagatgtgagctactcgaaataccaaggtgtctcgctcgaaaatggaatcactcaatggttgggtgtacgatttgctgctcctcctgttggtaacttgagattcgcggcgcctcaggatcccgtcaagaacaagactacgattgtcgctgatactgtgagtactgtaccgggttgttgtgaaagtcttcgctgacgaccgaatgcacagttcggaaacacttgtctgggaactggctccgctgccagcaacacttcatccgaggactgtcttttcatgaacatctacgctccatcgaacgccacaaccggtcacccattgcctgtatacttcttcattcagggtggaggattcaacacaaattcgaaccccaactacaacggtaccggcttgatcgaggccagtaaccacaacatcgttgtagtgaatttcaactaccgtgtcggcccttatggtttccttgcctcggaggagatcaccaaaggaggcagcactaacaatggtctcaaggatcagatcaaggctcttcaatgggtgcaaaagaacattcgcaagtttggtggtgatcccgatcatgttgtgcttggaggagcatcagcaggcgctgcttccattaccctcttgctcaccgcacacaacggacgcaacgacggtctcttccacgccacagctgccgaatcgcaatccttcgccgccgtccgcagcattaacgaatctcaattcatgtatgacaatctcgtcatccgcaccggttgcgtagactccaaggatacattggtctgtctccgcagtttgaacgcaacatacctccaatccaaaaatatcaacactcctttccccggcgctcagaaccctcccctctacatgtacggacccactctcgacaacgacgtcgtaagcgacctcaccatgtccgcctaccgcaaaggcaacttcatcaaactccccgccatctacggcgacgacacaaacgaaggcaccgtcttcgtccccgcaaacaccagcagcatcggcgaaagcaacactttcctcaaagaccaattccctctgctcacaactcctcaactcaagcaaatcaacgctttgtatcctaataatgcatccaatgtattccctaactcgggggcgtggtggagacaagcttctgatgcgtatggcgagctcagatacaattgccctggcatcaacgtctctgatatctacgctgccaccttctcccgcaaggatatttggaattaccactgggatgtcattgatcccgtcgctgcagccgccggtcgcggagtcactcacaccgtcgaaatcaacgccatctggggtcctgaaaacaccagaggcaatgcacctgtttcttactccaccactaatgcggcgatcgtgcctgtcacccaggcatattggacgagttttatcagaagtttcgacccgaatacttatagattgaagggaagtccgatgtgggaggcttggacgcaggggcagaagcaaagattgcatttcgtcaccaatgctactgccatggaaaatgtggatgcgggccagaaggctaggtgtgaatacctcagcagtattgctttggatatcaagcagtag

SEQ ID NO: 2146 - DNA, 1230 bp, Aureobasidium pullulans
atggttaacattactagagtgaacttgctgagtttggctgcgagtataccgtatgctgcggagttgcaggctgtggtcaatagctcggttgatcatttgtcttttatctcttatagtgagttttcaatgcttggttgccttggtcgtgagaaggagagtggctgacacgtttcgcccaaagacgaatctttcgttactgatattctgggactcaatgtctcacaacaactagtcggaaactaccaggactttcaaccatttcacgaagccggtgtctacaatattcagactggcaaactctatgccacaagcaactggcaaggcagtctcgacaatcccatcaacgtgaccgccatcgatatccacggcaacaacagcatccagtccctccacttcgacaaactagccgaagcaaacggcggctctaccttctacccagtgggcactcccttcaacagcagtgaaggccaacaaatcgtcttctgcgatgagggtgatttcatcaatcctgctcagttggtcctggtagatccctctacaaaccagaccagagtcctcatcaacaacttcctcggccgcaacttcacatccatcaacgatgtcaagcaacaccccatcaccggcgatctctggttcaccgacgtcccatacggatactggcaatacttccgccctgctcccgtcatcaagaaccaagcttaccgtttcgaacccaacactggtgtcgtccaagcagttgccgacgacgccattgctcccaatggtattgaaatctctcctgatttcaagcacgtatacatcaccgataccgctgttcacacattccccaacaaggataacttgaccatgccctctaccatctatcgttatgatatcacacctgatggcaagaggttgcagaacaagcagctttttgcttattcggatattggattacctgatggcattcattgtgatactgagggtaatgtttacgctggttgtggggatggtgtgcatgtgtaagtttttctcttttgctcgtacatcctttcatggagggcaagctaacgtataatttacagatggaaccccgaaggtgtcttgcttggtgttttcgcagtcgatggtggtgccgcgaactttgcctttgtgcctggtggcatgtatgtgttcaatgagcacagattgttcaaggtcactttgcaggctgagggtcgtgaggtcaagagagactttgggctctactga

SEQ ID NO: 2147 - DNA, 578 bp, Aureobasidium pullulans
atggtcatgatgcgctcaaacagcatctcttccgtctcgtccctgtcgtcacgctgctcgacagcagacccggagcccagcatgcaaatcttcatcaagaacatcgcaggtgacagtacgtttcctcataccctcatcggcgactcacgtgctcacctcatacagcatttgccctcgaggtacccgagtcaacctcgatagcgacactctcatctctccttgccatccgtacgaatcttcccgctcaggacatgcgcctcgtgtatgcaggcaagcatcttgattcgtcatcaagcacactatcggactacaacatcggccgggaaagcactctacaccttgcgctcccattgcggggtggagcacctaagaagattcgttgccagttcaaggactgcaaagatgctgctcagcgcattgtcggagattgtggcttctgcaatggccacttctgcggcaagcatcgtatgctcgagagccatgcttgcactggactcgagacgtgcaaggaggaagagaagcagcgcaaccgcgaacgcttggagaaggagagaaccgtcgccatcaagggcatctaa

SEQ ID NO: 2148 - DNA, 2030 bp, Aureobasidium pullulans
atggtcgtcgtcaaccagtgtcgcgcactattccttgcgtcatgcctttctgcagcagcgtccgcccagaatgctaccttgccaatcgttgacctcggatatgaattacatcaggcggcgcactttgatgtttgtatcccctctcagcttcgatgagtatctgcttaccgtgagttctgtgtagagtgccaccaatctgtataacgtaaggtttcaatgaaaaagatattcttgatgggaatctgacagagtcgtcagttctcgaacgttcgttatgccgcacctcccgttggcgacttacgctttgccgcgccccaggtaagcgactctttcacgccccgaactttcaaccatcgttctaacaacattcgcatcatcaaggtccctgctgtcaaccgatccgtcgtgcaaagaggtgacgttggtcgcatatgtgcacaaggtagtccggactggttcacagctgaattgtcggttgttccggacttactcagcggtaattctgcatcgatcaatgtttcagaagccaccaagaccctgcaaggtctgagagctcaaacttcagctcaagtagcagcaaactcttccgcgcttctcgccaaccaagaccctcgtgtgtcagaagattgcctgtttctcgatgtatttgccccaaaggacgccttcgatctagccggcaagggatacggaagtcccgtcatgctctatattcacggaggagggtacgtatggtggaactcccgatcaaggaatccgctaatctactcctagcttcgcgtccggttcgaaagccgacacagatccaacaagcttactcgatcaagccaaggtcgatggtgaagatattgtgtttgtaaccataaactataggttgggcgcttttggttggctcagtggacccgaatttcaagtcagtggcggtatagcgaatgcaggtcttcatgaccaaaggcttgcactagaatgggttcagaagaacatccacctttttggtggtgatccgaacagagtgacaattatgggttcctctgcgggagccagtagcgtcttgcatcagatcacagtcggtacctccatctcccaccgtcacaatccccaactgacaagcgagacaggcatacggaggaaagaaaagccctgcacctttcgcacaagccattttggagtcgcctggtttcgccccaatgccatctgcaattcagcagcagaagacctttgatcaatacatgtcgtacctcaacgtcaccagtctgaccgatgcgcgtcagctcccttcgcaagccttacttgcggctaactctctttccatcgctctcgcaccatttggtagcttcggatacagcattgctgtggatggagatttcgtccctgcgctaccaggtcagctgttggcgaacggcttctacgacaagtccatcaagaacattatgactggacatgctttgaacgaagcactcggattcaccgaccccacgacccaaaacgacaccgcattcagaaaatcagtgatcggtaacttcccttctctggctgcctaccccgatgaagtcgactatatcctcaacactctctatcctccaatcttcgatggctcgcaagctcagaattataccacccagcttctgcgtgcttccgcgttcaattccgaggtctcgcttacatgcagcaattactacctgaacaaggcttttgcaaattcatcttatggttatgaatttgcagtgccgccatctttacatgtggcatcttctgcctccatctttaccccgacgaacgttctccgtggaaacacgacaagcaatatagactggaaatctccactcaacgatgcacagattgcttatgccatgcaaagttatgttaccagattcgtggctactggaaacccgaacaaagatggcattgcggagtttggaatctatggaggtgataattctgtgattgttgttaatacgacgggtattgctcgcgctcgagcttctgttgcgaatgagaggtgcgagttttggcagaagggcctgttctactga

SEQ ID NO: 2149 - DNA, 1632 bp, Aureobasidium pullulans
atgcgttgtcttctatcagtcatatctctgagcgctttgtttgcttcctgcatctctgcgtcttcccctattgttactgtcaagaacggcactgttcaaggtcatcactctactgagtggaaccaggacttcttccttggaattccttacgctcaacctcctgttggcgatttgcggttcagatggcctcgacctagaaataattcctttgacggggttctggatgccacccgctacggttacagctgttatcagtacgggagcaacttcaacctgagtgaggattgtctgactcttaacgtggtgcgtccaacaggccatgagaataaaacactgccggttctggtctggatctatggtggaggactcacactgggtagcactgccgatcaacagtacaatctcagcggcatcgtagaagcttcaaccctgactgataatccatttatcgccgtcagcatgaattatcgacttggtgtctggggcttcctcaatacaccagttgttcatgcagaaggttcttccaatgctggtcttcttgaccagagacttgcacttcagtgggttcaggaaaacatagcaccttttggtggtgaccctagacgagtcactgtctggggagaatcggcaggagctcaaagcatcggcttccacttgaccagctacggcggccgcaacgacaatctatttcaagctgccattttagagtctggaggacctgagggcgcaagtttgaacacgttacctttctactccgccgcgactgacaatctgacaaggaccgtgggttgtccaaggacatggacgtccccttcccagcttgcatgtcttcgcaatctcagctcagcagctcttttcgcttcgaactataccgtcgtttggaatcccattgtcgatggagacttcttgacagattatccctcatccctcctagcccaggacaaattcattcgtgtacccttgctcacaggcgcgaacacggatgaaggtgtttctttctctgtccaaaatctcaacactactaccgatgtctataactccctgttctactggcgcaattatgcactgtcgcctcctagcatccgagagctactgcagctttatcccaacaaccctgctatagagcctccgtactccaaccatgccaatgtcacgtacccgaaatacggcacacagtggcgacgctcggcagccattggaggtgatctggtgatgatagcacaacgccgcagaatggctgagctgtacacgaaggctggtcagaaggtctactcataccgcttcgacacacctctttacaacgcgactgtgcctggatcagtcaagcacttcgacaatgtcatgttctccttccaaaacatctcaggagccatgggacctttgccacaatatcaatcgtacaggacattgagttctggcattggcaagctatacgccaactttgtgggcactcacaaccccaatggcgtgaacacgactaatggtactggattaccttactggcctcagtacaatatcgatgcacctaccaacttagtcttgaatgccacggcgagcttctcagagccagacacgttccgcaaacagggtatcagtttcatcaacagtatttggcgagaattgttggcatag

SEQ ID NO: 2150 - DNA, 1026 bp, Aureobasidium pullulans
atgaaattcaccatcgcggccacaaccttgagcttcgctctagcttccgcatttcctcagaaaaatgctcaagtcgctatgccggatgatattcatgcctggcatcctgctggcgtcaatgaccgtatgtaaccgtgtctttctcgatgcagatttcaaaccatactcacagtttcacagtcagaggtccttgcccaatgatgaacactctcgccaaccacggcttcatcccccgcaacggcggcaacatcacaaaacaaaacgctataagaggtctggctgatggtctgaacttcgacgccgccctggcttctttgatgtgggatcaagccatcatcgccaaccccgagccgaacgcaacattcttcacgctgtgcgctacaccatcctctttacccaaacccaaaaggaggaaaataaatactgacgaagatggtagtgaacatctgaaccaacacaatgtactcgaacacgatgcaagtctatcccgcatggacgcctactatggcaacaaccacgttttcaaccccgaagctttcgcaaccagcacgagatactggacagacgaaacgcttaccgcaaacatgctggcaaacagcaaattagcacgcatgatcgaatccagagcgttcaatcccaactacacattcaccgccaataatgagcaattcagtctgggcgaagttgctgctccatttatcgcttttggaaatacgactagtgttacggtgcctagggatttggtcttgtattttttcggtaagtggtgagagtgagacggtggagagagctttagctgacttggtgatagaacatgagaggttgcctcatgagttgggttggagcaagaagaatgagacgatgacgctgaaggatattttgaatgtcgtgtcgtctattaggaatgctacgagtctgttgaccccggagtcagcctcgaaccagactgcagatggtgaatctcatggcattcccgagggagcacaagtcgctcgccgtagtctgcatttgcccgggggtgtttga

SEQ ID NO: 2151 - DNA, 1936 bp, Aureobasidium pullulans
atgccttccttctctacccttgttggcgccttccttggtgtagcctctttggctgcaagtgccgctgttcctgtttctcaacccttcgaacatgtcaaggccaagagacagtccacgaatgctaccagcagcagtggtctcgaggtcgacttgggatatgaagtttacgaaggctacagcaaccagactacaggcatcaacatctggcgagggtaagtcatctcatacatgttgttgatcaaaatactgattgaacacttcagaatccgttttgctgcaccaccaactggatcattgcgctggcaagcacctcaagttcctgcagagaaccgttcgcaaaccatccaagccaatgctttcgcgcctcagtgcccccaatcttctttcaacgcttacggaagaactggtgcgagcatgctctcagatgaggattgtctgttccttaacgtttatgctccggagaatgcaaccaatctccctgtacttgtctggatccatggtggtggatatggacttggaaacggccaacaggatatgcaagccataatcaacactaacaacaactctttcattgctgtagctatccagtaccgtctcggtgctttcggtttcttgtcttctgatgaagtcgaccgcttcggctccgtcaatgctggaatcttggatcagaccttcgctctccaatgggtgcaatcctatatctcttcctttggcggagaccctcgctctgtaaccatctccggtgaatccgctggaggcggtgctgtcatgctgcagaccatggcttatggcggtactttgggcacctcgttgttcaagaacgccattgcggcttctccttacctgcccatgcaatatggatacaaggattgggtgccctcgcaatcctactacgcctttgcaggtcttgcaaactgcatgcccaacacaccctatggatcttcatctcgcaccatcttcgagtgcttggtcaaccaagacaccgataccctacagtacgccagtttcaatgtctccactacgggcacattcggtacttggggcttcttgcctgtcacagatggcgtctttattcaagatgtacctagccaacaacttctcgaaaagaaggttaacggtcagaatcttcttgtcggcaacaatgcaaacgagggccctctcttcgttcctcaagatatcgacaccgaggccgatctcgtggcttggctcgaacttaccttccctctcttctccaacgatgatatcgccagaatccttcgctactgtgagttttgcactctccttaccagacttttctcttccttgatcacatactgatgataccatagaccctagctccaacgcgacagactctccctctgccgtcgactttgcaacaacaggagactccggccctactgctattaacgtttcctccgtagccacaggccaacaacaacgcgccaacaacatctacgccgaaaccaccttcgtctgcccctcctactggatggccgaatcctacaccggcggcgacagaacctctttccgctaccaatactccgttcccgccgctcaacacggcgccgatgtatcaggctacttcggtcccgccgcccccactcaaggtccagccttcgaagccgcattcatgtccatctggggccaattcgtcatcaacgacaacccctccatccccaccaatgtcgcaggagagggcggtcaagctgctgtcaatttcccgcaattcaatgtttggaacccgctccaggttaaccttaatcaaactggtgggcaagaggttagctcgaatatcgtgcaaggtgttaatgctacggtgtatgtgggacctgggcttagcaatgagtttgaggttgttaatgcttatgattgggaaggtggaagagggcagagatgtgatttctggagggcggttgctaagatcgtgccggagtag

SEQ ID NO: 2152 - DNA, 1557 bp, Aureobasidium pullulans
atgcatgttacttccttacttacagttgcatctctctctgctggatctttggcatggccgaagtatgtttcgcaacaagatgacatgtctgtgcagacttcctccggtctcattcatggaatcaaggactcgaagtatcccaacgttcgtcagttcttgggcattccatttgcacaacctcctactgggtcgctccgctttgagcctcctcaagcacttcctgcatctgccgcaaagaaggtggtcaacaatactcaattgcctcccagttgtatgcagtatctcaatacagaaagtcctggagtctacgttgaccaaatcctcgaatttggtctgcaaggcttgaaccgcacaggctctatcagcgaagactgcttgacgctgagtgtctggacacctactggcaacaacaaccaatcgtgtcgtagtagtgaactactgccagtcgagatctggatatacggtggtggcttcagtactggaggacaggacgtcccttaccaaattccaagtcaatgggttgagcgaacgcaggaccacattgttgtgtctattaactaccgcgtcaacatcttcggcttccccaatgctgcaggactaagtgaccaaaacgttggcttgctcgatcagagggcagcagtcgaatgggtccgcgacaacattgtcagattcggaggtgatccctctcgcatgctgctctggggtcaatccgccggctcgatcagcgtagactactacaactatgcttaccccaaggaccccatcgtcagtgccttctcaatggactctggtaccgctttctctgtcatccaatccgttgacacgcaacacacaaacttcacctttgtagcctctcaactcggttgtgcaaactcttcctctcctgaagcagaactggcatgtattcgcaaggtatccgctaaggacattgaggactttgtcgcgaactatcaaatcaatggcacttcaccaggcatttccttcctccctatccccgacgaaaaagtcgtcttcagcaactacacttcccgcgctctcgccggcaaccaagcaaacatccccgctatcatcggcacgaatgctcaagatggtgtaccgttcgctccctacagttcatccggcccgaatgccactctcgcacagctcgctctcctccgcactttcttctgtcctgccaccgagagcatccgtttacgtcaattgaccaaccgcccaacctatcgctatgtgtactctggcaatttctcgaacatcgctcctgcgccttggttgggtgcttatcactcctcggaactgccattgctgtttggcacctacgacaacttcagaggtgcgggaccggcattggagggacagactagtgtggcaatgcaggatgcttgggttgcgttcaccaaagatggaatgcaaggtattgagagcactggatggcaagagtatgaggtgttgggagagaacactgtgagggactttggtgacggtgttgcggtcaaggatacagatctcaagtacttggaaggtctttgtgatggttcgatgccgaattactctgcttga

SEQ ID NO: 2153 - DNA, 2129 bp, Aureobasidium pullulans
atgaaggttctcagcaccattgctgtttgcgcggcctctgccaatgcgtaagtgatggttccgtcaaccatctaatgcatccactcacgagctatgcagatttgagtggacatggccgaaggtctccgacgaacccatctatcctcccaatggatacaacatgcccaccaagggacctgtggacaactcaacttacgagtacatcgtcgtcggatctggtcctggaggttctcctttggcagctcgtctagctcttgctggacacagtgtcctactcatcgatgcaggcgaggatcacgggacagacagacaagtacaggtaccagctcttcacccttacgccagcgagtacaacccgatccgatgggacttctttgtggatcactacgccgacgaagagcaagccaagcgcgactccaagatgtcataccttactccgtcgggagagtactactctggactcaacccacccgaaggctcggtgagaaagggtgtcctctaccccagaactggtgcgcttggtggctgcgctcaacacaatgccctaactatgatacttcctactgagaacgactggaacaacatcgccaccctgactggagatgactcatggatggccaagaacatgcgcaagtatttcgagagactcgagcgtaaccgctatgtacccagcagttttgtcggacatggatttagtggttggctcgaaactcgtgtcacacctgttctactcatcgccgaagatctcaaggtcttgtcacttgtcactgccgcagccaccgccatgggcaagggccttattggaggactcttacataccgtcactggccttgctgaggtatgtcttgcagtaatagtaaccactcatgcttcgctaataaaatctgcagatcctgacgctcgacatcaacaaccctaccaagtctcgcgacagtgccgagctcatctaccagattcctctttccatggacggcgactacgttcgcagctctcctcgtgactttgttctccaagtcgctggagctactaacaaggatggttccaagaagtacaagctcgatgtcgctctcaacactctcgttaccaaggtcaacttcgatacctccaacaccaagcccaaggcaactggcgttgactacctcttcggtcagagcttgtaccgcgccgaccctcgcgctggtactgatgacggtggtgaagccggaactgttcatgccagccgtgaagtcatcgtctccggtggtgctttcaacactcctcagatcctcaagcttagcggtgttggcccagctcaagaacttcactctcacggaattcctgtagtcaaggatcttcctggtgtcggtggcaatatgcaggacagatacgaggtcggtgttgtcggcaaggctccttccgagttctcattgctcaagaagtgcgagttcctgaacggcacagacccttgctatgacaactggaagaacaatatcggagctctcaagggcggctacactaccaatggcattgccttcggtttcctccaccactcgtccgtctcggagagcgatcctgatcttttcctgggcggtgtccctgcctacttcaacggctacttccctggttactctgtccacgccacccaagatttgagcatctggacatggcttactctcaaggctcactctcgcaataatgctggtactgtcaacctcacttcatcaaaccctcgtgacacccccaagatcgtcttccgctctctcggtgagggcgttggtggcgacaaagatctacaagctgtctacgaaggtgtgcaacacggtatcaaagctttcaaggacctcattcctctcgacggcaagtttgaccgcgtctggcctccacctgagatgatttctgaggaggacctgaagcagttcatcaaggacgaggcttggggacatcacgcttcgtgcactgctcccatcggtgctgatgacgatccgatggctgtccttgacagcgagttccgtgtccgtggagttcatgggcttcgtgttgttgatgcttccatcttccccaagattccaggcatgtatatcgctttgcccatttacatggtcagtgagaaggctgccgaagtgatcatcaattcagctgcttcctcataa

SEQ ID NO: 2154 - DNA, 1745 bp, Aureobasidium pullulans
atgaagactgtcacccttctggccgttgcctttgcttccgtatcctgtgtctctgcgttgtcttcgaagatctctctggattatgcaacatatcagggaacagctggtttcgatggcataacccgattcttgggtatgcaatacgccgctcctcctgttggtgatctgagatggaaggctcctcaggatcctgctcagaccacagcaggtcagtctgccgcaaaagtaagttcgtatgccatcgctgaaccagactcacatgctgaatcttgtacagttcaaggacgtttgcattggagtcaaacagacagtgggaactggtcctatcggtggattcacttacggcgaagactgtctctacatcagcgtcatcactccatctagtgcaacaaacacgagccatctacccgtcctgttccacattcctggcggtggcttcgcccagctggcggaccccaacttggatttcaccgacttcgtcaagacttctgggaataacatcgtcgctgttcagatcaattacagagtcggtggtcttggcttcctcgccggcgaagaggtgagatccgggggcgcgttgaatgcaggtctgctcgaccaacgaaaggcactgcagtgggttcgcaagtacatctcacaggttagatcactactcaattctctcccgtccttcaactcactgacatgcacagtttggtggagatccaaatcgcgtcacgatcttcggaggctctgctggcgctggatccgttggactacagatgactgcatatggcggcagagatgacggactattcgcaggagcctacgccgatgcgcctgcttattcagaagtcaatagcgactcatattcgcaattccaattcaacaacttcgcgaccgctgctggatgtggctccgcaacagacagattatcctgcctccgacaagccgatatcgcgaagatccagaaagcaaatgtcgtcggcaactacaccgacattgctgcacaattcaccttcaatcccgtcatcgatggcacattcgtacaggacataccacttcgcctcttccagaccggccatttcgtcaatgttcctatgattgttggagatgccacagatgagggcacgctctttgccgcaaatgccggctctcctgaagaagtgtcggagttcatgcaagccaacgtcccaagtctcactgaagccaacttgacgacgatcaaccagttctatccactcatggccgcacaacaaccatttcacaaagcttattttccatcagcagccgcagcatttggtgaagcaacattcatctgtccaggcctcaccatctcaagcgctgttggtgcttcgaatcaggtttggaactaccgtttcgatcagagctcactagccctgagacttgctggatacggcgtactccacgctttcgataccggtgcaatattcggccccaatgccggtccaatggcaggacttttgggcatcgtagagaatggcctggtcttctcatcctttgctggcgagaatgcaaatgtggttcctatcatgatgaattatgccatttctttcgtcaggacacaagatcccaatacttacaagagtgtgttttctccgaattggcagacttacaacaataatggtggcaagcagaggatcgttgttcgcaactctggtgtgatctacgaggatgtacctgcagctcagcagactcgttgtgcattctggactgacataatcgccaactcttttgccgagtga

SEQ ID NO: 2155 - DNA, 1764 bp, Aureobasidium pullulans
atgttcgcaaaggttgctcttgtcttgactgcagcactgtccttggtggatgctcaattcaacaatccaacaggtgtcgatatttggtgtggcaaggcgtatagagatacgtaagttctctttggtgactagaagctgttgcagcagactgctcacaatcgcagcaatgcttccttcaatccaggaggctggttccaagaaccttcaaaatccgacacaccatttgttgacttcaaaatcaaacctcggatgaacttgtatctggaagatgatacaatctccagcttcatagtcgatgcacctgtgtcttggtacgttggccatgctttgcctggtggtaacacgtcaacatcaagacagggatcgaagattgttctcaacatcgtgaccgggaacagatctctccatctgaatcagacgtcaatcaagcttgggtcaaccaacaacgagataccattcgatctatcatcgttttcagcaaggtccgaaccgcacaacatcacagtgactggtacactcgacggccacaagaatgtgactttcaccgccacgactcagcttaacaggctgccgcttcgctcagacaacggtacggcgactcggcttgataacctgtatggtggcttgtctgttcgaaaagggcaagccaaagaatggacttctctgttcccctacacgtattatgtccaatggagtctatactggtacgccaacctgacaaccctcgacgaatttgcagcaatgggctacaacgtaattcacattgtgcccactggcgaccttggcgatacaccatttccctgggacaaatttcaaccctatttggaccgcgcagacgagctaggtctctactttatgtacgacgtacgctgggattatgccaatctcaccacaatgattgaccaaatccatcacttacacacgcacccgtccattcttctatggtacacggcagacgagcctgacggcaagtccaaccctatcaactcgactgctatagcctacaacactataaaggcaatcgatccctaccatcctgtctcattagccctcaactgtcgagacttctactacgccgattatgcagcaggtgctgagattgttctcgaagatgtctatcctattagcacgaacacctcgtactcggccgtctacgatacaccttgcaacgctacctatggctgttgcggctgcgacgactgctcaggcagcttcaccgacatctctgatcgtctagacgaatatactgccaaagacaatctgcttggctggcaaaagatccattgggcggctcctcaagcattcggaaacgagacattctggactagatatcctaccgctgccgaagaggtcgtgatgaacatgttgagcattaatcacgcggccaaggggattgtgatgtgggacttccctaccaaggccgaaattctcgaagtcaccaacaagttggctgctgttctgactgacgagaaggtggcgaagttcctgataggagcgccattgacacagaaattgaaggtggctggtgctgagaatatcgatgctgcggcctggaccaaggatggcgaggtgctggtctctatcgtcaatcttgactatggaaatacaccttccaatgtgacggtcaccttgcctgaaggcatgaaagttgctcatatggaggaaggtctctgggggaatgcttcgtggagtgtgcacggtgagaagctgtctacaaactcggttatgggcttagaagtctccttgctattgctgaaaacatga

SEQ ID NO: 2156 - DNA, 1860 bp, Aureobasidium pullulans
atgaaagtcctcgctagtgggttcttgctgctcaatactgcatctgcagctgccaccaaaagatacaatgcctatcatggcgctgccgtacctacagtacaagtcaaaaacggcacctacacagggtaccatgctcccgtctacaataccgacaacttcctcggcatgccatatgctcaaccaccgatcggcgatttacgcttccgtgttcctcagtctctcgactctacctggtctggctcgaagaatgctaccgagtacagccccgagtgtattggctatggcagagatacctggagtcaaggcaactatgtcagtgaagactgcctgacattgaatgtcatcaagccaaccggctcatgcgaaagccttcctgtccttgtctggatccatggaggcggtcttgtcatgggaggtagtggagaccgtcggtacaatcagtctttcatcgtccagcaatctgttgaagcaggcatgccgatcattgctgtcagtatcaactatcgtctttcgtcctggggcttcttgtacggtcgcgagatccaagagtcaggtaatacgatgaacggattcagggaccagcgtcttgctctacgttgggtgcaagagaacgttgctgcttttggtggtgatcctgaccgtgtcactattcaaggcgagtcttctggtggcacgtctgttggagcgcaattactcgcctacaacggtcgggatgatggtctctttcatggtgctattgcacaatctggagctccgattagccccggagttgacttcgacgttgatgactgggagcctatcatcgccaacatcagcagagctactggatgcaacggcactggctctgtactcgactgtcttcgcaaaatacccactgatcagctcaactctgttataaactctaccgtcacgagaggagcccgctacggccctgtggttgatggagattggttcacccaaacagcttcgcaagcactgtccaacggcgacttcttgaaggtcccatacatcatcggcgtcaatgaggcagaaggtgtagtctttggtccgagacaagtcaatacgacccaagagatcttggattacattgttgactcgggttatgataatgccacagctcatggtcttgcgatactgtatcctgatattccagctattggcgtaccgagcactctccacggcagaccgaactctaccatcggacttcagttcaaacgtagctctgccattgctcaagacatgagcatgaacgccgcaagacgcctgacatcccactggtgggcaaggcacggtgccagatcctatacctagtaagcatcagcagatgaatcacaatcgcgaacattctttactgacgttttgtacagcatcttcaatgccctggtcaatggcctctcctacttctcaggcgcagtgcacttccaagaggtggctttcgtcttctacaacacagaaggcctaggctacccgcagaatggcaatcccaaccctcttggtggaccagaaagcgaatccctcgtcacactggcgaagcaaatgtgtcgtatgtggatcagttttgtgaactatggtgatccaaatatgcatctgggctgtaagtcaaactgctttgcttcattgaaaagggaatttgctgatgcttggtatctagtgaaagcagagccttggaatcctgttgatgcggaagagcctgagttctactatttccagcagaacgagacgtcgaagtcgctgcctgatatcgttcgtgcggagggagtgagttattgggaggagctgatcatggcgaggaagggcactgattgtactggcatcgttgcttgtggtggcagttatgatggagacctgaataatctgtga

SEQ ID NO: 2157 - DNA, 1041 bp, Aureobasidium pullulans
atgaagatcactaccgccggtatcgccacctttggcatccccctactacaaagagcgaccgcgcaaaacatgtcttatggcgccaacaacttctaccgcagcgacaatgtcacgatctggccaatcacgttccctacaatctaccacaccaccatcgcagccaaccttttcctcccagacacattggatcgcagcaccaaccactccgccatcatcgttagccatccaatgggcgcagtgaaagaacaaagcgccaatctctacgccacaaagatggccgagcaaggattcatcgccgtctccatcgacctgccatcttatggaggaagtcaaggactccccctcaacaacgtaaacccagacatgtatgccgaagccatcagtgccgctgtagactacctcggtctccaatcctacgtcgaccgcagacgcataggcgctatcggtatctgcggatccggcagtttcgtcattagcgctgcaaaaatagacccgaggattgcagcagtggctacgtcaagcatgtacgacatgggcgccgtcaaccgtgatggactcgaacattctcaaaacttgcaacagcgtaaagaactcatcgcacaagcggcagaacaacgctggatagaagctgcaggaggggaagtggaatataatctgggcacccctttgcgattgaccaattcctctactgcagtcgatgcagagttttatgatttctatcgtacttcccgtggtgaagttactcctcctggttcaggtcctaatatcacgaccgcacgcactactaccagcaatgccaagttcatgaacttttacccctttaacgacatcgaaactatttcgccgagacctatgctgttcatggctggcgatattgctcactcccgcgaattcagcgccgatgcgtatgcgcgcgctgcggagccgaaggagattatctgggttcccggtgctggtcatgctgatttgtatgatcgcgtggatttgattcctttctctaggttgtttgagttcttccgcacaagtctgccttcccagtaa

SEQ ID NO: 2158 - DNA, 1102 bp, Aureobasidium pullulans
atgccttcaactctcttccccggcgtcgctctcatcaccggtgcttcctcaggtaagcttcaacacatccgctattttatacacaactctatctcacaaaaccgtaccaggtatcggtaaagcaacagcaacatccttcgctcaagaaggttgcacccgcatcgccctcgccgacatctccgaagcttccctcaccacaacccaagaatccctcaccaaatcctaccccgacacccaattcctcgccattcccaccgacatctcctcccccgaagcagttcgaaacctcttccgcaaagccgtcgaaaagttcggcagaatcgactatgcagtaaattgcgccggtgttttgggggcagcaaagaaatcccatgagatgactttggaggaattcgatcacattgttaatgtagattatcgtggatcgtggctgtgttcgagggaggagttggaggtgatggttaatcaggagccactggagactcacgatgggagaaaagggagtagaggtgccatcgtgaatgtggctagtcagttgggtattgtggccagacctcaagcacgtaagtttgcgaaccctaccctcgcagttgatgtatatgatgctgatatgattgacagcggcatactgttcagcaaaagctgctatcattggcttgacgaaatccgatgctttggattattcggaacataatatcagagtcaattgcgtatgtcctggcgttgtcgaaacaccacttatcaacgatgaggtccgaaaggcgatttccatagctcccatgaacaggtatgtccgcttttctctaattgttacgtccaatcttccgctgctcatccaaaattggatcaatatttgcgttttgtgtcttgaagcctcaaatcacattcatcgcggcgttctggagacgacagcggagaagactaccgagacattctcttgacattggaaaatttgtcgtctggccaaaagtgctgatttgggtactacagagcaggtacaccgaccgagatcgccgactgcatccttttcctctgctcaccaaagtcatcgtttgtccaaggagccgcattggtagcagacggcggatacactatcaactag

SEQ ID NO: 2159 - DNA, 1726 bp, Aureobasidium pullulans
atgctatcggtcatctgccttctcctgggtctagatcttgtttcctccacgcctctcgcttcgaaacatgcacggagctctaccgtgcaccttggctatgctacctatcagggtgctgcattagacaccggtgtcactcagtatcttgggatgcggtatgcatcatcacccacgggagagctccgttggcgcgcacctcaggatcctcccacaattcaccgcgtccagaatgctacgcaagtatgtcaatgctgtatctcgcacttgcatcatccctgacatgcctcagttcggagctctgtgtgtcggcattggagagagtgtgaacatcaatcgcacggaagattgtctgtttatcaatgtgtatactcccaacaacgcgaccaggtcatctaagctaccggtgtgggtatacattcccggtggtggatacgcaaaagaaacgaacagcaactacaacgcaacagaggttatcagagcttctggccagaatgttgtgttcgtgaatttcaactaccgcgtctcggcatatggattcctagccagcaagaaagtgagagaggacggcgatctcaatgtgggcttattggatcagagaaaagctctttactgggtgaagaaatacattgctcaggtaagtcgagctgcttccacgtcgaacgagctccactgagaactctagttcggcggcgatccaaatcacgtcgtgattcacggtgtgtctgctggcgctggttcggttggaacacatctcattgcatacggtggccgagatgacaagctattcgtcggcgccataggacaagctccattctttccatgtcagaatgatatctcacaatcggaatggcaattcgaccgcttcgcttctgcagttggttgttcgaatgtatcgaatcagttggcttgccttcgagcacaaaatctaagcactctccaagcagccaacataccatcgccctttcccggtcagactattactccacttttctactatcttcctgtcatcgacggtgatttgatacaggaagccccgatccttcaattcgagagaggcaaacatatcaaagtgcctctcttggttggcgatacgacgaacgaaggatcagccttcgccgcaaatgtatcgacacctgccgaagtctcctccttcttggcggccaactgtcctcgtctccctgcatctgctctggaagaggcaaacaagctctaccccctgatgagtcctttacctcgtcatgcagtctactttccctctgcttctgccgccaccggagaatctacattcatttgccctggactgttgatgtctgaatctctatctcgcggtcagcatagcaaagtctggaattaccgcttcgatgtttccaccgtggaagaaacagccgctggattaggtgtgccacatacctttgatacaccagcgatttttggtccacattatcaaggtcctgcagtagcggcatctctctcagtacaaccgtttacgacatataatgcacccatcgtgcccatcgagatgaactactatatctcctttgtccgcaccctgaatccgaacaccttcagagctaaagatgcacctatctgggagcctttcgagggaaagaatggacagcagagattattatttgaaatcaacgggactacgatggaagctgttcctaaggcacagcaggagcggtgtgacttctggtactctctggcggagattgacggagagtaa

SEQ ID NO: 2160 - DNA, 410 bp, Aureobasidium pullulans
atgcttgccgcaaccatcatcacagccttcatcggcagctccatcgtcgcagctgctcctgccgatgtatcggctcgtcagctcaccatctgcagcggaacatacagcaatgctcaatgttgcgccaccgatgtcctcggtcttgccgacttgaactgcgcaaaccgtgagtaacaagtccactaccactacctctctgttacatatgttgactccaatctttgcagccccgaccactcctactagccaagaggatttcatcgatatctgtgctaccgagggccagcaggctcgttgctgcgcgctgcctatcgtaagtcgcatgcgccttcacgtgaactctaaacacgttgagctaacacatcttccagcttggtcaagctctgctgtgcggttcgcccctgggttga

SEQ ID NO: 2161 - DNA, 1719 bp, Aureobasidium pullulans
atgcgtctggaagtgttgaccatatcagccgtggctgtcttcggcctaggcacatcagtcgcagctcatccaggacctgatgctaagaaacagagttcggtacagaggcctatttcatggacccttctaggagctgaccaattccagagcacctcgacttcttctgttgcaagcgacacagcattcagctacactcaagtcaccagtgatcgatacgcgaccccgatcgcatcgcccgtcaagtaccaaagcgcgttcgcaccaccgtattcgaaggcgaagagtctgctgccatcgggcatcacgtacacgacctattctctgaacccctcggccacctcagatggaagatatggacaaagcgcgtatgccgctctttgggctgggtacagctacctgcataccgtacctttcacaaccactgctctaccgacactcgtcgcaaccagcgagctcgtcttccctcccgccctccctttcgaaacgagctctgcctcgatgaagtttgacaaagactttgtctggggagtcgctggcagtgcatggcagatcgaaggcgcattgcagcaagaaggtcgtggccccggcggtttagacatcttcggcaaccagaaaataccagctttggccggtcaaaacgactctgccgtgacagacatgaactactacctgtacaagcaggacatcgctcgcttggctgctatgggtgtgccctactactctttctccatctcctggagtcgcatcgtaccctttggcaatgccaacactcctatcaaccaacaaggcttggatcactacgacgatgttatcaacacgtgtttgcagtacggcatcaagccgattgtgactcttgttcatgccgacacgcctccttcggtcgactacgacaacgccacatcttcgacagcggattacttgtggtacaagcagactttgaagggtacgggcaaagtgactgtcaagtttgccaacaaccttgctgtccctcgagacccagccaacaaagacgacgtcgccgctgccttgaggtatcaagatttcatcctcggagtctggggcaatcctctcttcctcggaaaacaatatccctccagcgtgctcaatacagctgtcaatctcactgccttgactcctcagcagatcgactctatcaagggctcggttgacttctgggcattcgacccttacgtttctcagctcgcttctgcccctgacgatggcctggcctcgtgtatcaacaactccagccacactctcttcccttactgcgccaacctcacacaaaatggcattcagcaaaatggttggcagttcggacaaaagtcgaacgactacgcatacatcgcacctcagtacgtccgccagcaactcggctatgtctggaagaccttccagcctgccggcggaatcatgattacagaattcggcttcaaccctttcaaagacgcagaaaagacattgcccgagcagcgctatgatttggaaaggacgttatacttccaagcattcttgacagagactttgaaagccatgtaccttgacggcgtgaaagtcattggtgcgctggcgtggagtttcgtcgacaacaatgaattcggatcgtatgagaatcagtatgggttgcagactgtcaatcgtacgagtggaaagtttgagagacactacaagcgcagcttcttcgaccttgtggatttcttccacaatcatatcgcataa

SEQ ID NO: 2162 - DNA, 1482 bp, Aureobasidium pullulans
atgaagttgcctttcatagcgccactggtgcttacaatctcctcgtccatcctccattgttcagcgcaactcgttggtccagtaggaccgactacctccttgacccaaaagactcacatctgcaacatcctcgactacggggccgtcgctgacaatgtgactgacatatcgtctgccctgcacgctgccttcgataattgcgttcagaggaatcaagggtctcgactttacgttccaacgggaaactacctgctcaagcagtctgtggtgttaagcaacgcaacatcctgggcattgcaattggacggtctgatcacggcggcatatggtggtgactggaacgttgaacgtgagctcattcttcaaggttttgctggtaggcagaagcttggtgaacttattgatggagagggtgacaagaattttctcttagatgtccttgtcatcgtcaacgctgttgatttcgagttctattcgtcgaacggactcggagctattcaaggtcagggatatctctatcgaaacttgaacaacaacgaccgaccacgactcgtacgactgatctcgcccaccaacgcgtctgtccacgacttgatcctggttgatagccccaaattccactttgtttttgactacggtctcaatattgaggtctaccatcttacaatccgtggcgcaaatctgggaagctacgatggcatcgatgctgttggcacgaactattggattcacgacaacgaggtgactaaccgtgacgaatgtgtctctgtaaagagcccgtctaatcacgcactcgtcgaaaacctgctgtgtaaccaggctggctccggcatatccatcggaagcttgaatgtctctgcacaaatctcgaatattcacgcaagaaacatctccatcctgaacggcaacaatgtcgccttcatcaagacttatccggggggctccggctacgtgaccaacgtgacttgggagaacttccgcagtaaagccagtctatacgggttgagtatcaaccaatactggcaaaacacattcactcccgacacaggcgctgtagccctgagtaatctcgtattcaagaacttcacaggatctgtcgcaaacggagtacaaagaccaccgctttacctggttgcgaatgatcttacgttcgcgctgaacgtcacggttcaagacatcaaactctggaccgaggcaggaagcagtgtggtgaaccacatcaacaatatttttggcagaggcgacaacatttatagcccaggagatggcataagaacgtcacctgccaacggaacgccgacctcatatagtagcactatcaccgtcacgcaagcaccaacaggttgggtggggccaggttatcctgcttgggctgttccgacaactggatatggcacgaatgtgccgataccagtgtatacgcctgctgtgttgtggaagcctactggtgattatgacaagcattattggggctctttctga

SEQ ID NO: 2163 - DNA, 1323 bp, Aureobasidium pullulans
atgaagtactccactttcgttgtcgctgccgcagctggtactgccgcagccgcttctgctcccgcatacggccaatgtggtggccaaggatggactggtgccactgcctgtgtctctggctaccactgcgccgcccagaatgactggtactcccagtgtgtccccggtgctggcagctctgctccccagaccaccaaggtcgttacttctgtcaagcctaccaccaccaaggccgcgacctccatcaaggctaccactaccgccgctgcaagcaaggcccccgtcaccactgccgccagccgtgcctcgaccaccagcaaggctgccaccagctcggtcgcttcttcaaagggcaaggtgaagtacgccggtgtcaacatcgctggcttcgacttcggtattgataccaacggcggctcgggtacttaccaagaccccggcaccactggtcagtcccagatgaaccacttcgtcaaggatgataagctcaatgccttccgtctccccgtcggctggcaatacctcgttggcaataccctcggcggcaacctcgacagctcgttcttttcgaagtacgacgcccaagttacctactgcctgaactccggcgctgagctgtgtatcatcgacctccacaactacgcccgctggaacggtgccatcgtcggcagcagcggcggccccaccaacgcccaattcgcctccgtctggtcgcaattggccaccaagtacgcttctaagcccaaggtcgctttcggtatcatgaacgagccccatgatctccaggacatcaacacctgggccaccaccgtccaggctgctgtcaccgccatccgcaaggccggagccacccagaacttgattctgctgcccggcaatgactggacccacgctgcccagtttgtcgacaacggctctgctgctgctctcaacaagatcaccaacttggacggcagcaagaccaacctcgtcttcgatgttcaccagtactccgactccgacggctctggcactaacagcgcttgcaccaccgataacgtcgccggattcaccaccctcgccacctggctccgtgccaacggccgtcaagccatcttgaccgaggccggtggctccaacgaccagtcttgcttgaccaacgtttgcaccatgctcaactacctcatgaccaactctgacgtctacctcggttggaccggctggtctgccggcatgttcgcttccaactacgtcctttccgaggttcctaccggcagtgctggttcgtacaccgatcaggctattctcaccaagtgtattgctggtgtcttcaactccaaataa

SEQ ID NO: 2164 - DNA, 2382 bp, Aureobasidium pullulans
atgttcatcaagacagcgagcaccgcatgtcttgcagtaacttttccgttcgcttttggcctcgatgtacctccaaggaacaactcagctcaacatatagcgttaggaaaggccaaagtcttcctctctcagcttgatacagccgaaaagataggtctggtaactggaagttacggtcccggtccagtgctaccctgtgttggtacgatcgcgggtattccacgtctcaacttcagcggtctttgttactccgatgggccgactgggtatgctcgctctgatggcgtcagcgtgtttccttcgggtgtcactgtggccgcgacatgggatagggatctcatgtaccaacgcgctttagctattggagaggagttcagagctaagggtgctcatgtacacctggggccttctcctgggcctctgggtcgcagcattgttgccgggaggaactgggaagggttcggccccgatccgtacttagccggtgtcgcgacgaacgcttcggtcaccggtatacaagccgctggcgtccaggcgtcttcaaaacattatatcggcaatgagcaagagacccagcgcgggtcttctaccctcagcggtggactcacagtcagcaacggaaccgtcatagatgcggtatcggccaatattgatgaccgcacgctacacgagctatatctgtggcctttcgccaacgcggtgcatgctgggactgcatcagtcatgtgtggctacaaccgcgtcaacggtaattacacgtgcgcgaatccggatatacttaacaggattctcaaagatgagctagcattctcagggtatgttctatccgactgggatgccacacactcaacagaactatccgcaaatggaggactggacatggaaatgccagggacgcagagtgtttctgaagtctcgtactttggcgattcgctccttgcggcagtcaacaatggtaccgtgtcgttggatcggctcaacgatatggtgacacgggtcatgatgccatactatcttctcggccaagaccaggactttcccgaaccagatcctgcaagtggaggtgtcttcttgaactatcaatatggctacaactcgcctctgtcaagtgtatatcctgctgtcgatgctcgagatgttcgtgcagatcatgcaaagatcattcgcagaattggtgctgctggcactgtgttgctcaaaaacacgaatggtgcgttgcctctgactcacgagaccaacatagggcttttaggaaacgatgtgtcctatccaacaatcggctccgtttacttggactacgacaatgcggaaggttacgagatgggcacacttgacatcggcggaggatccggaaccgttagacatacgagcttctctactccagaggaagctatcgagagaaaggcgcgcaagttgggtatccgggtgcaaaagctgttcgacaataaagaggtcgccgagggtctattccgaaccatatacccaagacctcaggcctgcttggtctttctaaaagctttcgccaccgaaggaacggatcgagcgtccccagatcttcaatggaacgctacagcagtggtggaaagtacagcggcattctgtccgaacaccattgtcgtgactcatggaccaggcgttgtagccatgccttgggcggacaacccaaatgtgacggccatcctggcagcgcattatccaggagaggagtcaggaaacgccctggtggacgtgctttggggcgctgtcgagccctctggtcggcttccgtactcgatccctcgaaactcttcagattatggtccaccaatcctcagttctgtagccaatgcaacagatccgaacgcatggcaagtcgattttaccgagggccaaatgatcgattacaggcaattcgacgcaaacggcacagaggcgctatatgaattcggatttggcctctcgtactccaactttacgatgtcgagtgatacgtcattcgagctcattgatggccccttgagtgcgctccctgatcaatctcaagggatggttccaggcggattggcggatttatggaaagttgttgctgtgttgaaggttgaagtgacaaattcaggccacagagctagctcagcagtaccgcagctttacgtctcacttcctcaagacaccactcctcccggtacgccacacaaggtcttgagaggatttgaaaagctgcatctcaaggctggagagagaagagaagcgagattcgaactgatgagaagagacctcagctattgggacctagaaaacagacaatgggttgttcctgaaggcattgtccaattctcggcgggctttagttcgcgcaatctcgttgcaagaactcacgcacgacttgtgtacgatcagaactag

SEQ ID NO: 2165 - DNA, 738 bp, Aureobasidium pullulans
atgaagttccttactgctgctgccgtcatgctgggcgttgcctcggctgcccctactgccaccattgagaagcgcgcccagcagtgcggtcagtgggacagcaaggtcactggcgcctacaccctgtaccaggacctctggggcatctccggctacactggctcccagtgctccgacatcaactccctcagcggcactactctgaactggtggaccacctggtcatgggccggcggttcaagccaagtcaagtcctacgccaacgtcgtcaccaagaccaacgccgtccagatcagcaagatcaagtccctcgccactagctggaagtgggtccaaaccggcagcaacgtcgtcgccgacgtcgcgtacgacatcttcacctcctcgaccgcaggcggcaaaaacgaatacgaaatcatggtctggctggccgcactcggcggcgccggccccatttccgccaccggctcccccatcgccaccgtcaccgtcgccggccactcttggaagttgtggtatggcaacaacggtgtcaatgaggtttactccttcacccccaacggcagcaacgtcagcagcttcaatggcgatttgatggatttctttgcgtacttgatcaagagtcagggattcaaggatagccagtaccttatttctgttggtgctggtactgagccttttactggatctaacgccaagctcacctctgcttacagcttggttcctgcttacaagtaa

SEQ ID NO: 2166 - DNA, 1209 bp, Aureobasidium pullulans
atgtcgtcggcgtcaacctcgtccgctctgtatgcaaccgtctcgtcttcttcgcgagcaaccggtgccgtgccaaagaacaccaaggaattgcgccatcataacaagaatggaaagggcttcatcaacccttgggactcttatgtcgacagaactgctccacaaattatctcggctttgatctggcgaaagctctcgggcaagcagaacacgcccgatacgaccccacccaccgtcccagttcagaaacccgacttcctacccacacgcgagaccaagacgttacgagcaacatggctaggacacgcctgctactacgtcgagttccctagtggcttaagagttctcttcgatcctgtctttgagccgagatgcagtcccttgagcttcatgggcccgaagagatatactcccgctcctgtcgacgtggccgacattcccataatagacgccgtcgtcatttcacacagtcattacgatcatctttcataccctaccatcctcaagatcaaagaaaagcacccgaatgcccacttctgggctccgttgggaaacaagccatggttctcgaaatgcggcatcgagaacatgaccgagttggactggtgggagtcgagggacttcactctgtctgcgaagaagcaagatgcggaaaccacacacaccgagaccgggtcgactgtgaacgctggaggtgccgaggacatcaaggctgtcatcggctgcctcccttgccaacatacaagtgctcgtactccattcgacaagtcacacaccctatggggctcatggagcattgagagcggcggcaagaagatctggtttggaggagatactggctaccgctctgtccctgaccttcccgaagaggagaacgactacgacgagaagcacaactacccaacatgtcctgctttcaaggagattggtgagctcaggggtccattcgatctcgggttgatccctatcggcgcatacgaccctcgtttcatcatgtctcctatgcacgccaatcctttcgacagtgttaacatctttattgatacgcaatgtaagaaggcgcttggaatccactggggcacatgggtactgacagaagaggaagtccttgagcctccgaagctactcaaaaaggcaatggcctggaaaagccttcccgagactggcgtgtttgacgtctgcaatattggcgagagccgcgagtattga

SEQ ID NO: 2167 - DNA, 921 bp, Aureobasidium pullulans
atgcatttctcttcgctcattgctcccgtctttgcccttttgggtgcggtgtctggtaactcgctcgctggtcgtgcggcccagctcacccaggttcaaaactttggcgacaacccttccggcactggaatgtacatctatgtgcctcagaagctggccgctaagcctgctgttatcgtagccattcacttttgcaccggtaccgctcaggcatactatcagcaatctccctattccaagttggccgatcaaaaaggattcatcgttatctacccttcttctccccatgcaggtacatgctgggacgtctcgtcgcagaagtctctcaagcataatggtggcggagatagcaatgcaattgccaacatggtcacctacactttgaagaagtacaacgccgatcctaagcgtgttttcgtcactggctccagctcgggtgccatgatgaccaatgtcatggcaagtacttatccggagttgttcgctgcggctactgcctactccggcgttcccgccggttgcttcgtctcctcctccggccaagtcgatgcctggaactccacttgtgcccaaggaaacgtcgatcagtctgccgcctactggaccaacgtagtcaagaacatgtaccccggttacaacggtgctcgtcctcgtttccaaatctaccacggtagcatcgacaccacccttcgccccaacaactacagagaatctgtcaaggaatggaccggcgtcttcggctttgatgcaaacaagcctcagactgtcaagaacaacttcccggccaacggatacaccactgatatctggggtgttgactcggccaacccgctcggcaaggttcagggtatctacgctcttaacgtcggacacaccgttcccatcaacggtgctcaagacatggcttggtttggtctctaa

SEQ ID NO: 2168 - DNA, 726 bp, Aureobasidium pullulans
atgttcttctctacttcttccactgcgctggccgctctggtgcttgcacctttggcacttgctgcccctgccacctcccccaaccctgccatttttgagagatctttgaactctggcaagggtacctggtatggcatgagctgtggcgaggaagcttgctggcaacaaggcgcttgcgctttcaccgactacgtccttccctcctccattgccggctctacttgcgtttctgagaccatctggaacaacggtcagaactgtggtggctgtgtctccattacctacaagggcggtgctaagaagattgccatggttaccaacaagaccggtggcgacaagaaccacttggacatgtcgcccaacatgttctccaagatcgccaacaagaacctcggcgaaatccccatcgagtgggagttcgttccttgccccatcaccgatggtcttcagatcaagatgcacggcggaagctctcaatactggtttgctgccactgtcatgaacgctcggctgcgtaccttcaagctcgaggtcagtggcgacagcggtaagacctggaagcccaccaccagaaacgtcaacaacttcttcgagatcaccggcggtactggcaccaagactgcttgggtcagagccacttccgagaagggtgacactgtcatcgtcaaggatgtcgacatgtcctctggtaagaccaccaagagcactgtcaactacaaggcttag

SEQ ID NO: 2169 - DNA, 1110 bp, Aureobasidium pullulans; identical to SEQ ID NO: 1782

SEQ ID NO: 2170 - DNA, 1638 bp, Aureobasidium pullulans; identical to SEQ ID NO: 1783

SEQ ID NO: 2171 - DNA, 2361 bp, Aureobasidium pullulans; identical to SEQ ID NO: 1784

SEQ ID NO: 2172 - DNA, 1254 bp, Aureobasidium pullulans
atgtttttcaaacacacattagccgcattgagtgcggtagcaactgcattcgctgcacctcacatgaagcgtgccagtggcttcaactgggggaacgaagtcatgcgtggagtcaatctcggtggatggctggtcctcgagccgtggattactccctcaattttccaagcctacccaaactcacagggcatcattgacgaatacacactcggcgagaagcttggtagcgatgctgcctacaacgttctgaagcctcactgggactcctgggtgcagcttgccgatttcgaaaagattgcaaagtccggctttaacgttgtccgtatcccgataggttactgggcatacgacaatgccaacagtccctacgtatctggagctgctccgtatatggatcaagccattgcgtgggcaagacaaaccggactcaaggtcatcgtagatttgcatggtgcacctggctctcagaacggtttcgacaactctggtcaaaagacaaacaacgtcgacttccagcaaggagataatgtgcagcgcactttggccgtcttgcagacaatccagaacaagtacgcagattcatcctacgacgacgttgttgcaggtattgagcttctcaacgagcctctgtccacggtgatgaacctggacgacctcaagcagttcgagcgcaacggcttcggtcagcaacgcaccgtgtctaagaagcgcgttgtgattatccaagacggcttccagccacctaacacctacaacggctggttgacaccttcggacaacaatgcccagaatgtcgctctcgaccaccacgaataccaagtcttcaacaacgagctggtctcaatgcaaccctggcaacaccgtcagtacgtctgtaacaacgccaagacttacggtggtgccgacaagtggactttcgtcggcgagtggtcagcagctatgactgattgtgcggctgcattaaacggctatggcattggtgcccgttacgacggtacataccctggcagcaactatgttggatcttgtggcagcatcaactacatcgatcagtggtcgcagaccatgaaagacgacacccgtggctacattgaggcccagatggaggcttttgagagaaacaccatcggatgggtcttctggaacttcaagaccgagggctcacccgaatgggatgccttccgcctgatcgatgccggcgtcttccctcaacctcttaccgacagaaagttcaaccagatctgctcttcatga

SEQ ID NO: 2173 - DNA, 2403 bp, Aureobasidium pullulans; identical to SEQ ID NO: 1786

SEQ ID NO: 2174 - DNA, 1215 bp, Aureobasidium pullulans; identical to SEQ ID NO: 1787

SEQ ID NO: 2175 - DNA, 882 bp, Aureobasidium pullulans; identical to SEQ ID NO: 1788

SEQ ID NO: 2176 - DNA, 1830 bp, Aureobasidium pullulans
atgtcaacacctgtctcatgccgaaaactgcttctgcttatcgtttttcaacatgagggttgctcagagcctcagatctatacggctctgacacctcttattcttgctagagagattttggcccaaaactataccaatgccacgaatagtgctgtaccaagctctaccactgtcaatggcactgctgtggccaacccgagtgcttttgtaacaaacttgcagttgtctgttgaagatctttgggacttctttgttgggccagtcgacacagcgaatacgactacgactatcgaggcgactccagtgccatctagctcttcgataccccctccgtttataggaagctatggattcccacctggacgtcaagtacctctcgtcacaaagaacgagtcctggagctttcccaaagacttctaccttggtgttgctggtgtttctttccagattgaaggtgccgccagagccgatggaaaagggccgtcgacgtgggatgtgaacatgcaccgtgtgcctggatttgccaccgataacagcaccggagacatcacggacaacaactactacatgtacaagcaggacattgcacgcttatcagctatgggaattaatgcctactcgttctccattgcatggacatgtctcttcccattcggtaccggaccagtcaacgaactaggcatcgctcactacaacgatattattgatacgtgcatccaatacaacatcaccccgatggctactttatatcattgggacatgccggcattactacaaaaccaatatggtggttggttgggcgagcagatcattggagacttcaccgagtacgcgcgtatagcatacagtcgtttcggcgacagagtcaagcattggttcactatcaacgagccaatcgtgatttgtacatcacagtatccaatgccagcaggctattggcgcaatttttccattccgaacgtcgagcagccatttgtttgtggtcgaaacatcttgctggcacatgcagcagcgtatcgactaggaaagtccatcattccggacagctccatcacattcaagaacaacggtggttacaaagtccccctgaccaacagctctgccgatgccgaagctgtgcagcgagcatgggacttcaacgaagggtggtttgcggaccccgtctacctcactggagattggccatcgactgtcaacgactatgtgtcttccttcctgcctcctattacatctcaacagaaacaattgattcttggttccgccgacttcttcgcccatgacgcctacacggctcaattctacatggctcctgatgcaggcattgaatcttgcgtagtaaatgctagcaaccctctgtacccgtcatgtgcgaacagcagctacacctatggaccagctcaaggaaattggatcatcggtcctgctgccgattctcactccccttggctacatctagctaccgactggttcccagcattcatgtcctacatcaacaccacttggccatctccacacattcaaatcacagaattcggttttgccgagcccttcgagtcttcaaagacgctgttacaagacatactctgggacctcatccgaacatcatactaccacgactacatggaggcgattctgatatcgttgagtgaaggcatcaagatcactgcagctctggcgtggagtttcgtggacaatcttgagtggaactctggcttcagtgtgaggtttggattgcaacatgtcaactttacagatccggctctcgagagacactataaggctagcttcttcgagtataccaacatgtatcagacgtatgtagagaagtag

SEQ ID NO: 2177 - DNA, 1980 bp, Aureobasidium pullulans
atggccctcctcgcaggcctcgcggctttgcctactttgacattcgcttctccaactctacacaagagactggccaatggattggcattgacacctcctatgggttggaacagttacaaccactacaattgtgccccaaaccaaagcatcatccactctaatgccgaagcactggtttctcttggtcttgcagacttgggctacacatacgtgactaccgactgcggatggacactccctcaccgtacagcagacaacgagttgacatggaatgaaacactcttccctgctggctttcccgcgctaggtcaatacatccacgatcttggcctcggcttcggcgtctacagtgatggtggcatcttgatgtgcatgaatactgagttgggtacgaaccagactggtagcttgggctatgagaccactgatgcagagaccttcgtatcttggggtgctgatctactcaagtacgacaactgctggtcgtctcaagagagaggcttcccgaacgtggattacgagcccctgacttctcctcatcagaactatgtgaacatgcgaaacgccctcgatgctaccggcaaggatatgctcttccagatctgtgattggggtgttgatttcccttctgcatgggcaccggatctaggtaatacttggcgcgtcaccaacgacatcattcccaattggagaaccatcttccgcattgtcaatcaagtcgtgcctcaaacagattatgccgcacctggcagatggctagacttggacatgatggagattggcaacgatattttcacccacgcggaagagcagactcactttgcactctggagcattttgaagagtccattgaccatcgggtgtgcattgaatgactccatcacttcggtatctgcagagtcgctggccatcatgaaaaatgagaacgttattagcttcaatcaggacacgcttggtgtgtctgccaacttgacccgcagatacagtgatgaggggtatgacatttggtcaggacccttgagcggcaatcgtaccgtcgccgcattggtcaactggaacaacttctccattgacgcaacgtttgacttgccggacgcagggttgcagagtgctgggtgggtcagagatgcttggaccaacgagacaaggaagaatgtcatgaccagctacaaggcaagtgtggaagctcatggtaccttgttgctcgaactagacgacactataccagccggtgtctatcagcttgatggacaaagtggagacatcaatcttgagaatgtgtatgctctaaccacaagtgatgcatatactgtgaccatccattttagcagccccgttccgtcagcctgtgatctcggcatacacaatcaacaccagagatcctctcaccaagtacagcaaggtcaatctagcatcaccctacccgtctccctcatcgcagggaacagcaacaccctctccatttcaaacaccaattctataagctcaatcactgtgactccaccaaccggaaagttctatcccaataccgcttttgccatctctggtagcggtaacgctagccatataacttgtgtacccggtctctgctctccgctcggaaccaagattggcgacctgtctccgaacaactctgcctctctcaacattcctgcctcagcaaccaccactggatcaaggtacgtcgagcttacctacatcaacaacgatgttgccattggcacaagctggggagaaggccgtaatgcacgaaacattacaattactgtcaacaatcagaccactagattggaggttccattgagtggaaggagtagcgagttgtattcatcgatgaagggctggggagacagtgctgtgttgggtgtcttggttgatggttggaagcaaggtgataatgatgtcgtgattggtaatattggtggtgagaagggtgtgcagcctctaggtgccgattttgttggtctgaaggtcttctag

SEQ ID NO: 2178 - DNA, 1575 bp, Aureobasidium pullulans; identical to SEQ ID NO: 1791

SEQ ID NO: 2179 - DNA, 1278 bp, Aureobasidium pullulans
atgcatcacatttcacatcttgccctggcggcatcgctcatcagctcagctctgacatcgccggtcgatgtcactggcaagaagactgtgtctattgcagacatcaagggcaagaaaactttctccgtcgaacaggttctggcgaagaaacaacagatgcaagcacctgcactttcgatgctgaagacatacgccaaattctctggcacagctcctgttcagctcaaggccgccgcagcagcaatccaagcaggaaccgttcaagcaacaccacagaactatgacatgtcctacctatgtccagtctctgttggtgggcagacactgaatctcaatttcgacagtggtagtgcagacctgtgggtctactccacattgcaacctacctcacagcaaagcgggcactcaatatacgaccccagcaagagttcgacatcacagctattggttggcaatacctggtcaatcaaatatggcgacggctccagcgcaagtggcaatgtctatgccgataaggtcatcattggagcagtgacagcgacatcacaggctgttgaagcagccacttcggtgtcggattcgttcctgaaggatgttaacaacgatggtctggttggcttatcgttcagcaacatcaacactgtttcgcccaaccaacaaaagactttcttcgatacagtcaagagcacgcttgcattgcctctctggactgccaacctcaagaagggagctcccggcacctacgatttcggttacatcgactcttcaaagtattcaggcaagatcacttacgtcgatgtgaacagcgccagcgggttctggcagttcacagccgatggttatcagattgggtcctcttcgaccgtcagctcttcattcgtagccatcgccgacactggtactaccctcatgtaccttccctcgagcagtgttacggcatactgggctcaagtgactggctctggatacgacaagaatcaaggtggatacacattcccttgcagctcaacattgccagacttcaatctggttgttggaggcaataagttcactgtgcctggcagctacatgaactacgctcaaatttcgtacacgacttgcttcggtggtctgcaacaaaacacgggacttagcttcagcattcttggagacattttcttgaagtcacagtttgtcgtgttctcggaagttggaggcaaggcgtcacttggaattgctgcaatgtacaatggcacccctggtgaagatgatggcgacgagtgggagtgtgaggactag

SEQ ID NO: 2180 - DNA, 1440 bp, Aureobasidium pullulans
atgtctcgcacatctctgcctaaagatttcctatggggcttcgcaacagcaagttaccaggtagaaggtgctcccgcagaagatgccagaggagactcgatatgggacgtcttctgccgcattcctggaaagattgccggcaacgaaaatggagacatcgcttgtgactcttaccaccggtacaaagaagacgtaaagcttttgaaggatatgggtgcacgtgcatatcgattcagcatctcctggtctagggttatccctcttggtggtcgcgaagacccagtcaaccagaaaggtctccagtactatatcgatctcgtggacgaattacttgccaacggaatcgagcccatggtcactttgttccattgggacctgcctcagggtttagagagatatggaggcctcttgaacaaggaagaatttgtggccgactatgcgcaatattctcgaatcaccttccaagcactaggggacaaggtcaagtattgggtgactttcaacgagccttggtgcagttctattcttggatataacgagggcgtcttcgcgccaggaagaaccagcaatcgctccaagagttcggtcggcgacagcagcactgaaccctggttggtaggacacaatcttctgattgcacatggtgcggccgtgaagatctaccgggaagaattcaaaccaactcaaaagggacagattggaattaccttgaatggtgattgggtcgagccttgggaccccgaagatcccaaggatattgaagcttgtcaacgcaagctcgagtttgcaataagttggttcggtgacgtggtgtatttcggtgactatcctgaaagcatgcgcaagcaacttggagatcgtctaccaagatttactccggaagaaaagaacttggttcaaggcagtaacgatttctacggtatgaaccactactgtgcaaattacatcaagcacaggtccggcgagccggagccagaagactatctcggcaacctcgaatccttgctcgtcaacaaggagggtcaggaaataggacccgttacccaaagtccttggttgaggccacatgctgtcggcttcagaaaactgctcaaatggatctctgaccgttacggacgccctgtcatctatgtcacggagaacggtacgagcttgaagggcgagaatgatctctcgaaggaggagattcttgaagacgacttcagagtatggtatttcaaggagtacgttaccgccatggcagaggcatacactcatgacgatgtagacgtcaggggatacatggcttggagcttgatggacaatttcgagtgggctgaaggtttcgagactagatttggagttacttttgtcgactaccacaatggtcagcaaagatttcccaagaagagtgcgaaggctatgaaaggactgttcgattcgctcatgcgcgagtcgtaa

SEQ ID NO: 2181 - DNA, 1617 bp, Aureobasidium pullulans
atgaaggtcgccgcatacgcctctctgatcggagccgccacggctgctgtcactcctggccagtccatcctcaaggcccccaagcaggcttctgaggcgtggtctaagcctctgcacaacttgcaggagtctctcaagtccttgaccggcgaggctcgccaggtttgggatgaggtcgccctcatgttccccgaagccatggaccagaccagcttcttttcgctgcccaagccccactcccgcaagcatgacaacgagtgggaccatatcatgaagggtgccgacgtccagagcgtctgggtcgagaacgccaagggccagaaggagagagagattgagggcaagctcgagaactacagcctgagaaccaagaaggttgaccccagccatctcaatgttgacaaggtcaagcaatacagcggttaccttgacgatgaggaggatgacaagcacttgttctactggttcttcgagtcccgcaacgaccccaagaacgatcccgtcattctttggctcaacggtggccctggttgctcgtccttgaccggtctctttatggagcttggcccttcatccatcaacaaggatggcagcctcaagtacaacccttcgtcatggaacgccaacgcctcggtcatcttccttgaccagcccgtcaacgtcggctattcttacagtggcggctctgtcaccaacactgtcgctgccggcaaggatgtctacgctctgttgaccctcttcttcaagcagttccccgagtacgctagccagcctttccacatctctggcgagtcctacgctggtcactacattcccgtcttcgcctccgagatcctttctcacaagaagcgtaacattaaccttcagtccgttctcatcggcaacggtcttaccgatggccttactcagtatcctgagtaccgtcctatggcttgtggcgagggtggctctcccgccgttctcgacgctcaacagtgccaggccatggacaatgccctgccccgttgcttgagcttgatccagagctgctacgacagcgagagcgtttggtcttgtgtccctgcctccatctactgtaacaacgccatgatcggtccttaccaaaagaccggtcgcaacccttacgacatcaccaagaagtgcggtagtaacagcctctgctacgacgagctcgactggattagcgagtacctcaacaagcccgaggtcatgaaggctctcggcgctgaggttagcaagtacgattcctgcaactttgacattaacagaaacttcctcttcgccggtgactggatgcaacccttccaccgtctcgtccctggcatccttaaggagatccctgtcctcatctatgcaggtagcctagacttcatctgtaactggctcggaaaccaagcctggaccgaggcgctcgagtggcccggccacaaggatttcaagaagacccctctcgaggactatgttctcaaggacggcagcaccgctggagctgtcaagagcagcggaaacttcaccttcatgagaatcgatggtggtggtcacatggtcccttacgatcagcccgttgcgtccctcgagatggtcaaccgctgggtcgctggcgagtggctcgcttaa

SEQ ID NO: 2182 - DNA, 1152 bp, Aureobasidium pullulans
atgaagtacactggttttgctgcttctgccaccgccttgatggctggtgtggcctctgccgctgtcactggtgtcaccggtaagcctgaaggtttcgccagcggaaccactggaggtggtgatactgctgctgtctacccctcgacaaccgatgagcttgtcagctaccttggtgactcttcgcctcgtgtcatcgtcctcacaaagacttttgactttaccggtaccgagggaaccactacctcttctggatgctctccttggggcacaggcgctgcctgccagcaggctatcaacaaggatgactggtgtaccaactaccagcccgatgctcctaccgtttccagcatcacttacgacgctgccggtactcttggcatcactgtcgcctctgacaagtcaatcgtcggtgatggctccaagggaatcatcaagggcaaaggtctccgtgttgttaatggcgcatccaatgtgatcctccagaacatccagatctccgacatcaaccctcactacgtctggggtggtgatgctattactttggatggtaccgacaacgtctggattgaccacgtcaccacctccaacatcgccagacaacacatcgtcctcggcaccgatgcgtgcggaaatgtcacaatctcgaactcttacatcgatggctcgggcgactactccgccacctgcgatggacaccaatactgggccctttatttcgatggtgccggagataaaatttccttcaagaacaactacatctaccaaacctctggtcgtgctcccaaggtccagaccgacactcttctccacgctgtcaacaactactggaacgacaactccggccacgccttcgagattggtgagggtggctacgttctcgctgagggtaatgtcttcgagaacgtcgaggctcctctcgaggcctcttccttcaagggcgaacttttcaccgctgactctggctctgcttgctcttctgctcttggccgctcttgcgaggccaactctctcagcggttctggcactttcagcgagagcaacactgatttcttgagcaagttcgctggtgcttctattgctactgctggtcctgcttctgagatcaagtcttatgtcacttccaacgctggtattggcaagctcgctcagtaa

SEQ ID NO: 2183 - DNA, 2676 bp, Aureobasidium pullulans; identical to SEQ ID NO: 1796

SEQ ID NO: 2184 - DNA, 1656 bp, Aureobasidium pullulans
atgaagagtgttttggcgtatttttcggcattcttactcggcagtgtgccgcttgtgcaggcgtacaataaagatcatcatcaggtgtataagggaaatgatgcacgattgaacaaatggcgtactttccatgtggctggtgaagaagagcatgcgctttctgttcagtcgactcctaccacagggaatgcaaccttcagacaatacatcgatcatgaaaacaaggatgtgggaactttcgagcagttctacttttactcgactgaattctatggcggacctggctcgcctattatcctgttcacccctggagaagtcaatgctagcgcctatacctcttatctcaccctcaatagaactactggtgtccttgcaaaggagattggtgctgccattgtgtgtattgagcacagatactggggatattcttcgccttacgccgacctgaccactgagaaccttcaatacctcacacttgacaactcaatcagtgacttgacaaacttcgcaaagcatgtgcgtctgccatttgactaccacaggaaatcaagcccgaaccgtgcgccctgggtcatgatgggtggtagctattctggcgctctcgccgcttggactgcttcgactcaacccaacacctattgggcatactgggcatccagtgcccccgtcgagtccatcattgattactggcaatactttgtacctatccagcaaggaatgcccaagaactgctcttctgatgtctcacttgtcatcgatcacattgacaacatcttgctcaatggaacgacctcagagatcgctgctctcaagacaaagttcggcttggaaggtctcgagcacaatgatgatttcgcagctgccctccagaacggtccttggttgtggcaaggcaatcaattctacagaaacactggcttcttcgacttttgcgatgccgtggagaatgtcaagcctaacaccactaacaccactttgcctggcgccgagggtgtaggtcttgagaaggcacttgctggttacgctagctggttcaacactacttaccttcccggttcgtgtgctagttatggctacgatgagtggcaaggcgagcgtaacatcaagtgctttgacacctacgacgtcaccagcccaatgtataccgatacctccctatccaacgctttcgatcgtcaatgggtatggatgacctgcaacgagcccttcggatactatcagaccggcgctcccgaagacagacccacaataatctcacgcctttcaacccccgaatactggatccgccaatgccccctcatgttccccgcttccaacaacacagtcgtcggtctcagcagaggcgccaccgccgcacaagtcaacgccaaaacaaagggttggaacaattactctcccggccttctctacgtcaacggcgactacgatccttggagggaagccagtgtgtcttctgatttcagaccagagggcaagcttcaatccaccacaaagaaccctgttgtcatcgtccccggcggcttccacactagtgatttggtcacgcagaatgcaaaggctaatgctggggctaaagctgctatcgatgaggctgtgggtattatgagggggtgggttggcgagtttgagcatggcaagcattggtttgaggggtag

SEQ ID NO: 2185 - DNA, 2193 bp, Aureobasidium pullulans
atgcttggtttcgtaactctcgcccttgccggcgctggcatggtcagtgccagaagattgcctcatgttgctccacgccaattcaataacgatactgctctttcttcatctttaccttcttaccaggcttacatcaatgccactcgcaatgacaactctcctgtcgtcctacacattgacacccaagacaccagcaagcgcaatgctacttctccctacctgtatggtatcatgcatgaggatatcaaccattccggtgatggtggtatctatgccgagatgattgccaaccgtgccttccaaggatccaactcgattatttctaccctcgatggctatgttggcacctacgtaactgattccgagaatgatgtcgttccgttcgaccccgtcatgactgcttgggcacccattggccacggagttcgcatgactctcgatatccttcatcctctttcggatgctcttgagacctctttgcagatcgacttcccgttgaatgctactggcgaggttggattccaaaactttggctggtggggtttcgacattcaccctcagcaatacaacacctcgctgtggtatctgaacaactaccctcgtaacacccaaggcaatgccagcgacatcactgtttccttccgctcgaacgttacgggtgagacatgggcaagctcgactttcaaaaacgtcacacctacctacatcgatttcaagcagctggagaccactctgcaccccaatgcaactgcgcctgatgccaacaacactttcgccatcacttttgatggtgctcaggttgctggacagactttctacttcaacctggtttcggtgttccccgaaactttcaagggttaccagaatggtcttcgtcctgacatcgctcaaggcttctatgatctcaacccgaccttcttgcgcttcccgggtggtaacaacctcgaaggctatagtcccgctcagaggtggaagtggtgggagactttgggccctctgcagaaccgccctggtcgtgtcggcgattggaactattacaacactcagggtcttggtttgctcgagtatcttgaatggactgaagccatgaacattgaacctgttctcgccgtgtatgctggtttctcattggatgtctatgggcagaacggtgcctcataccctcccgagcagatgcccgagatcctgcaagaggctttggacgagcttgagtactgtatgggcgacaactcgaccaagtggggtgctcagcgtattgctgacggccacccggagcccttcaagatcaactttgttgagattggtaacgaggattggttcagtgtcacttacccttaccgcttccagatcatgtatgacggtctgaagaaggcatacccgaatatcacctacatcagcactgccttcaatgagaatgccgccaactacaacatctctatccctgatggtaacatgtgggattggcacggttaccaggagcccagttggttcctggccaacttcgacttgtgggacaactggcaagaggagaccaacaacaccggcgtcaccgtcttgttgggcgagtactcggtcatccagatcgataccccctccggcattgtcaactactcctatcccctcgacgtccatgtccagtaccctcgtcttctttccgccattgcagaaggtgtctatgcacttggtgctgagcgcaatcctaacactgttagaatgtcctcttatgcaccttcgctccagaaccgtaacttcactaattggactcccgatatgatttcttacgatgctctgcatgacaacaccgtacttagtgccagctactggcagcagtggctgttcgcacactaccgcggtaccgagaccttacctgtcactgccactgagggtgagattaaccctctgtattgggctgccagcatagacgaggagaataatgctatctacctcaaggtcatcaacaccttgaactctaccgtttcgcttagcgtcaacattccgagcgcttactcaggcgtcaacggcaccagtatcactgccagcgacctcaactcttacaactatgttggcaacaagacagaggttgttcctcgccctgcggaggtcgagtcgactgctagctccgcgaatggatctgcctggtcttgggatgtgcccaagttcagtatcactgttctccagtttgatctgtgttaa

SEQ ID NO: 2186 - DNA, 1287 bp, Aureobasidium pullulans
atgttgctgctactttgctgccttttggtattcttcttggggtctcatgcatcgcctgcatctaaccaagcgggaggtgtcacttgtgttgtcaaagcggcctccaatggacgggactctgcaaaagtcatccgagatgccttcaagacttgtggaaaggccaaatctggacaacggaatcgtatcgtgtttgagaacacaacttataccattgccagtgttctggatactactggtttgaaggatgttgacatcgagctgcatggaacactctcctggaacaattccaacctcaactattggctggaaaactcattaccgatgggttatcaaaatcagagtaccgcttggcgacttggtggcgatggtatcacattccaaggatatggctccggtacctttaacggaaatggtgacgcgtggtatcggttcatcaatggaaggtcgaactaccccagacgtccgcatcaattgacgatcactggtaccacgaactcggtattcgaagggttgatctttctccaaagtcagatgtggacgatgacgttgatccattcatcgaatgtgttgctgcaggacatctatgtcaataacacctccaagaccggcgcgccaacagtcaataccgatggagccgacacaatcttcgcaaacaacatcaccttccgtcgatggactgtagacaatggcgacgatgccatttcgccaaaagcgaattcgacaaacatcctcattgaggattcggcattctatcgtggttcaggtattgctttgggaagcattggccagtatgatgatacattcgaaacgattcaaaatgtgacatgtcggaacatcacatctcaccgaacgaaatatggtgcttacatcaagacatggacaggagtgaacaagggatacccgccaaacggcggtggcggtggttatggctacgcttcgaacctcaccttcgaggacttcaggctgatagatgttcaaaaagcattttcgattacccaatgcacgaacttcgaaggcaatcaaggcgattgcgatacatcgaagttcaacatccatgatgtctacctgagcgacttctcgggtacgattcgtggagacgttgtgacaacactgcaatgtagcgcagcatctccttgccgcaacatccagttgttggacgtggctgttataaacagcttgaacaacacagcgccaaggcagtaccaatgcgacagtgttaagcgaacagtaggtttcaattgtacaggtccacctgacggagaggacaatgcctttaagaagttatga

SEQ ID NO: 2187 - DNA, 1278 bp, Aureobasidium pullulans
atgtacgcctctcttctcgcggcactcagtgtgccggtgttagcacttgctcaaacagtggtcaccgttcccgaacgtgtttgtatcgtcgagccatgtgcaaatggcggtgactcggctccagccatcattgaagccttcgagagatgcggtcacaatgagagcccttctcgaggaaaggttgtcttccgcaacgagacctacaacatccatagtgtcatgaacactacgggcctgaagaatgtcgacgttgatctgaatggacttttgctctgggacactaacattccttactggctcaaccactcgcttcctgtgggttaccaaaaccagtcgagtgcttggttgtttggtggagagaacatcaattgggatggtcatggatacgccactcttaatggatctggacaagcttggtataccttcgtcaatggaaccaacaactacccgggtagacctcaccagatcacaatcaccggaaccaaagacagcaacttcttgggtacccgtttcttggactcgcagatgtggaccttgactgttatccatagcgaaaatgtccttcttgaagacatctatgtgaacagcaccggtaacgaacccgtcggctttgacttctcctctctcaacactgacggtgccgacaccgtgtatgcggacaatattaccttccgtcgctggagcgtgaccaacggagatgactcaatcgccatgaaggccaacagtaccaacattctgatcgaagactgtgacttctatatgggtctgggcgttgctattggcagtatcagtcagtacgatgacactttcgagtacattgaaaacgtcactgctcgtaacatccgctcttacaacatgagatacggcgcatacgtaaagacatggactggcaactcgactggatatcctcccaatggcggaggtggtggcattggctatgcagccaacatcaccttctcggactttgtcttggagaacaacaccggcatctatgctgtcacccaatgcaccagctacaatggcgcatccggaggctgtgactctagcaagttcaaccttcgcgatattcgcctgcagaactggaccggcactgctgtcagcgatgtggtagggagtatgcagtgcagcggatctagtccttgcacgggtatggagatcactggcatcgacattgtcgacactgtcaatggaactgctcccagccagtacctgtgtgacaacttgtcttctgttggattcaactgcactggtcccacctgggaggagaatagcagatag

SEQ ID NO: 2188 - DNA, 1896 bp, Aureobasidium pullulans; identical to SEQ ID NO: 1801

SEQ ID NO: 2189 - DNA, 1641 bp, Aureobasidium pullulans
atgcttcgtacttcggctattctgtcctctttgctttgtgctggctctgtgttcgcacagaatggaaccactctttcgacattgggaacacccataggagcacccgtaaccggtgactacagtggtgcactgagaccgcaagtacatttctcgccgcctaagggcttcatgaacgatcccaatggcctgttcgtcgacgctgatggcctttaccatatctactaccaatacaacccgacaggcctcgtcgctggcaatcaatcatggggtcacgctacaaccaccgacggctataccttccagaatcagcccgttgctctctttcctccaaacaacgagactttcgtgttcagcggctccgcagtggtcgatgtgaacaacactagtggctacttccctggtcaagacaatggtgtagttgccatctacactctgaacaacagcacttcgcagaaccagaacatcgctttctccaaagatggtggttactcattcgagcctttcgagggcaatccggtcattgatattggctcgactcaattccgtgatcctcaggtcttctggcatgctcagactgagtcatgggttatggtcaccgtctatgccgcagaattcgctgtcggcatctacacctcacccaacctcaaaaactggacccacgcttccaacttctctaaccatggtcttctcggcactcaatacgaatgccccaacttggtcgagatgcccgttgaaggctcagatgagaccatgtggctcatgttcatttccatcaaccctggcgctcccctcggcggctcgatctcccagtacttccccggttccttcaacggtactcacttcgaggctgtcgaccccgtcgctcgcatctccgatttcgccaaggacaactacgccggtcaattcttctccggtatccctggtactgagaagcgtctgagtatcgactgggccagcaactggcaatacaccaatgtcgtccccaccggcaacgagggctggcgcagcgcaatgaccgtcttccgccaaaaccatctcaagaagcttcctggagttggttgggatctcgtcagcactcccttcaacatcagctcgcagttctcacaagtccttgcttccaactcttcattgggtaatagcagtatcttgcttgattactcaaccgtgccttctagtgcactttactttgaagcaaacgttaccggtttgactcctagcacattggccggatctctcaacttcaccttcacctcatccatcagcggcgagaatgtccaaggtggcaccgtccccggcggtgccacatgggtatcacgcagaaacgcaggctggggtgccgagaacccctacttcaccgataaattctcctccaacggcgtctacagcggtagcgacaatggcacttggacattaagtggcgttctcgaccgcactattctcgaattgttcgtcaatggaggcgagcagagtgctactctggtgttcttccccgagtacccattggacacgcttagaatcggggctgcgaatattccagagggcgctggtgtcagtgtggctgtttggggtctgagagatgcttggtctggtcaggcgaactctgatggtcttgttttgggaaatactactgcttcggcttga

SEQ ID NO: 2190 - DNA, 2559 bp, Aureobasidium pullulans
atgcatcccaaagttctctcgcggctctttgccagtctcatcttgacatggaccctcggttttgtagtggtaaatggacaaagtactacccaaccttctcttgctcaaatcacaagcgcattggcatctggatctggtagtacctccttaggcagtgctttggcagaagctgggagtactctggaaagcatcatctctgacaccatcgctcaactcgcaagatggacgactctcattctatttcctgagcgctactattcgtatggacgctctcctgatgtgtatccgtcgccacagggccaaggcagtggagactggtcgcaagcgtatagtcaggcaaaagctttggttgctcagatgaccgttcaggagaaagcaaacatcactttgggctcttcggagacacacgactgtagcggcttcacaggtagcgttcctcgtcttgggttcccgggtatgtgcctgaacgatgccgaaagtggtgttcgcaccgcaagcaaagtcaatggttatccagctcaactacacattggcgcttcctggaatagatctctagcatacgatagggctcttcatctcggccaggagttcaagacaaagggtgtgaatgttcttctcggtccagtagctggtccccttggcagaattgcgactggtggaagaaactgggaaggcttttcaaacgatccatatctcgccggctctctgatcgctcctacaatttcaggcatgcagaagtccgtcattgcttgtgtgaagcacttcatcgccaacgaacaagagaccaatcgcagtcctttcctccaaggatttctcagtggcttgatcaacctgaacaattctgtctcgtcgaatgtcaatgataggaccatgcacgagttgtatctttggccgttctatgatgctgtcaaggcaggtgctggaagcacaatgtgcagttaccaacgagtcaacaacagctatggttgccaaaacagtaagaccatgaacggccttttaaagacagaactaggattcgaaggcttcgttgtaagcgattggtatgcgcaacatactggtgtcgctagcgtgaacgcagggctagacatggtcatgcccaactccatgtatctggatgtcaacagcttcgctaccgccgttaagaatggctctgtcaacagtactcgtctggatgatatggccactcgtatcctcgcaacctggtatcgcttcgccaacctacaaaatcctggcttgaacgatgctgaagcacgtcaggcggcggcagaaacaacactcttccagggtgccgtcgaaggccatgtcctggtcaagaacgtgaacaatgcacttccactcagaaagccgacagttctttcactgttcggatacgatgctcccggcggaaccaacacatccgccactagtttccagcttaagccaaacggaaagctcaatacacaggcatatactagtggtaagccctacactgatcttgatgacctgatcaactcggctcaggtgcttccggccggcttcgctggtcccgaggtcgctttgaacggaacactctatactggaggtggatcaggtgccatcacacccgtatcgtctatctctcctgaggacgcattccgcaatcaagctgccatcgatggcacgactttgtacgccgatttcacgtcacaagatcccaccgtcaaggctccgaacaatccatgcttggtcttcatcaactcccaatccagcgagacatgggaccgtagcacactagcagacatctactccgacactctggtcaccaacgtcgcttccagatgcaaaaacacaatggtcatcatccacagcgcaggcatccgcctcgtcgaccgctggatcgaccaccccaacatcacagccgttatctacgccaatctaccaggccaatacagcggaacctcgctgacggaaataatatacggacgccaatcaccctcgggtcgtctccccttcaccgtcgcaaagaatgaatccgattatggaagtttgctgcggccaacattgccggataggattaatcctcaatacttgcagtcggactttaccgaagggttgtttatcgactataaacgatttatacagcagaatgttactccgcgctttgcgtttgggtatggattgacgtattcgaatttcagctattcggggctgcagatgtctgctaatggtagtgcggttacatcgtcttctccacctggtacggttgctggtattgctgctgagggaggtacgacgtcgctttacgatatcatcgctaccgtgtcgattgccgtcaagaataccggcaatgttgctgctgccgaagtcgctcaactgtatctaggtatccctggcagtggcgtgcctaaagtgcttcgtgaatttgagaagcagttgattcagccaggtgcgagtgtcactatgacattcccgttgagaagaagggatatgagtatttgggatgcggtgaaacagcagtgggtgttgccttctggtgcattcaacgttatggttggaaagagtgttttggatattcagttacaaggtactttgacgttgtag

SEQ ID NO: 2191 - DNA, 1044 bp, Aureobasidium pullulans
atgttcactaaatatttcgcaactgcagccttggctgccactaccgccctcggcaatagctaccaactcgttgaggagagtcgtggagtcacattctttgacaacttcgacttccaaaccgattcgagtccaacacacggtacatcaaagtatatgcccagagcgtatgctgcccaacacaagctcattggcgttgtcaacaacaatggctcagcaggcccttccgcatatatcggtgttggctcgaccaacgttactgaggctcgactttccattcgtttggagagcaagaactcatataaccacgctcttgtgctggctgatataaagcacatgccatccggtcctggtttatggccagctctttggatggtcaacccaaccaattggcccgccggtggtgaaatagacatcatcgagcaggtcaacaataatccatataacactgccaccttgcacacttcggcaaactgcgcgataaccggcgactacatcagaagcggtcaatccgatctgttcagcggtacactcgagacccccgattgtgacgtaaacagccctttgcagtccaagaacgcagggtgcggcatccgcgcccctgaaaacgacacctacatggtcggtaacgagagctgtgtacactccaccgcaggctccggcttcaacgcccaaggcggaggtgtatacgccaccctctggacctcagcaggcgtcagcgtctacttcttccctcgcgagtacatcccctccgacatcaaagccaacaagcccgaccccagcacctggacctccaaacctcaagccgtattctctggcaactgctgcaactttgactctcacctcaaggacatgaagctcgtcatcaacactgaattgtgtggtgattgggcaggcaacacctgggaggccgacggagctgccgctgaaactggagtcaagacttgtgctgagtatgtgcaaaacaaccctcaggccttcaagactgcttattggttgatcaactcgatcagcatcttttcgaatgagactgttggtgcaaactaa

SEQ ID NO: 2192 - DNA, 1716 bp, Aureobasidium pullulans
atgttcagacaactatcgatagccgctgtggccttgtcactagcatcctctcaagtatcagccaagcccattcagcgtagggcagctggcgattcgtccttcgactacattgttgttggatcaggacctggcggtgtcacagtcgccgacaagctttccgaaagtggtgcatcagtacttttggtcgagcgtggtcaggcaaccactggccaatggggtggcaacaacaagcctcaatggctggacaactccggaatgaccgtctatgatgttcccgctctcgacgaccagatctggaccaagggcggtgacttcacaaatgatattttctgcgacgacattgttggcggtatctctggttgtgtgctcggtggcagtggcgctatcaactcgggactctggtggaagcctacgtcctgggactgggacactatgttccctgagaagtggaacagcaccaacatggccaacgtgaccgaccgtgtcttctcccgtctgcccggcactgaagtcccttctcaggatggacagctctactatcagcagggtgctgatatgcttgagggcgctctggatgctgccaactggacactggtcagtgccaacgaagtccctaaccagaaggacagagtctactccaacaccacgtacatgttccagaacggcgaacgcagcggacccatgtctgtataccttggatctgcatactcccgccccaacttctcactttacaccaacgccattgtcgagagagtcatcagagagggatccaagatcactggagttgagatttcgaacactgccgacgatggcttcagaggaaccgtcaaggccaacaaggctgtcgtccttgctgccggtgcattcggtacccctaaggtccttttcagaagtggaattggcccaagagaccagctcgaaactgtccgcaacactgagggctccaagatgatcggagaggatcaatggattgatctgcctgttggccacaatcttatggacaatatcaacactgatatcgtcatctctcaccctgatgtcgtttactacgacttcgctggtctctgggaccaccccaaccaaggcgacgtcgactcttacctcaatggacgtaccggcatgcttgctcagtccgcttccaacctgaaccccatgatctgggagctgttgaacggcaccgacggtctccaaggtctgcagtggactgctcgtgttgatacttccctcgacatcaacaatgatgctaagcacaacatggttcttgctcagtacatcaccatcggtcaggccgcccgtggcagaaccaccattactcccgacttgaagatgaacgtctcgaccggtgttgacgttatgcagcacgagtccgaccaggtcgccatcgcccagggtctcgacgacatgagaaacatcctcaagaacgtccctggccttgagattctctctcctgctgctgacgtttcttctctggattacgtcaagtcgaccacccacctctacgtcaaccactggttgggcagctgcaagatgggcaacgatgatggtcgtgacaacggtagttcggttgttgacgccgactccaaggtctacggtaccgacaacttgttcattgccgacggctccatcttccctggccagaccacttcaaaccctcaggccgccatcaccatcgtcggcgagcgtgttgccgagctcattcttgcactcaaccaatag

SEQ ID NO: 2193 - DNA, 3426 bp, Aureobasidium pullulans; identical to SEQ ID NO: 1806

SEQ ID NO: 2194 - DNA, 1419 bp, Aureobasidium pullulans
atgtttttctctaccaatctgctcgctgcaattgctggcgtgtctacattctgtgtagaagtatctggcgcattgttgccggaaagagatggggtttcgtcttttgtctatggacgtcaagaatcgacaaatacgtcgacatcatggccatatggacctttcagtactcaaggtcgcgatatcgtcaacaccagaggcgaggctcaaacctttgctggagtcaactggcctggcagcggtgagaccatggtccctgaaggtcttgagtgggcatctatcgaggacattctatctcaagtcgagagtgtagggttcaacttcattcgcctgacatatgctattgagatggtggaccagatctacgagagaaatggctccgacgtgggcttggaaattgctatgatcaacggtctgggctatgagaatggtaccaaggtaaccaacgagatcatcgccaagaaccctactttcaacaaagacaccacccgcttcgagatctgggaccacattgctcaagtcgcccagtccaagaacatcttcatccatcctgacgtgcacgtcggtaaagcacaatggtgctgcaacaacacagatggtaacgcctggttcgacgactacaacttccccgtcgcgaactggaagcgtggtcttcaatacgtagcccaatgggctacgaaacataacaacgtcgtctccatgtccctacgcaacgaactccgccgcgctatcaacgagaccgctcccacttctaccctcggctacaactgggtaacgcttgtaggcaactacacagcagccaccgacgccatccacgaatcaaacccagacctgttggtaacgtggtcaggaatgcaatacgaccaagatctctccgccctaatccaaggcaaaaacctcaacactgcgccttgctacaaatgcgatgccatccgcgacggcctccgcagagaacccatcatcttcgatctagccagccacccctgggccaacaaagtagtctacgaactccacttatacagcatgtccgaagacctcgacacgggatcctgccccatcgtattcgcagaactctacaatgccggtttcaacgcaatcggaatggccccaccacccgcctgcaacattacccaaaactgccatcctgctgtcagaaatactcctgttattatctccgaattcggagctgcgcaggatgtcacgctgctgaacaatactttgatgaattgtttgaaggatttcacggtgcagaataatgtttcttgggctatgtggagtctggctggaagttataggattcgcagtggtggacagggtgtcggtgatacttgggcgctgggcaactacaactggaccggttggaattaccctgaaggtgtagagtcgtggtggaagccttgggttagctcaatgtttgattag

SEQ ID NO: 2195 - DNA, 1377 bp, Aureobasidium pullulans
atgcgtgtttcggctgctatcgctgccactatcctggctggctctgccactgccgcacctactcccagtctcttgagcagcattctcggcctactcaccaacgacttgaactcccttctcaattccttgggcatcaagttgcagaccaacgccaacatccacggtgctaccgtcaactaccagcagcagtgccccttcaccatcgacacttcggtctctgtctctaccaacgtgttcagccacgacattacctggcccctcggtgtcaacggcggcaactacatcgactggaagaccttcaaggccaacggtgccaaccttggtggatggctggagaaggagcgaactcacgaccccatctggtggtcccaggttggcggtgacagcgctcccgatgagtggaccttgtgccagactcttgggtctcaatgtggtcccattctcgaggctcgctacgcctcgttcctgaacaccaccaccatcgatcagctcgccagtgttggtgttaacaccctccgtatccctaccacctacgccgcttgggtcaaggtccctggctcccagttatactctggtaaccagcaaaagtggctcaagatcattaccgactatgcagtgcgcaagtacaacatgcacatcattgttggcctccactctctgcccggtggtgttaacaacctcgatatcggcgaggccctcttccacgatgactggttctacaacgccaccaacctcgactacagtttccaggctatcgacggtgtcttgaacttcatcaagtcatctggctaccagaacgccttcaccattgcccctatcaacgaggcttctgacaacctctccggcttcggttccgctgctggtctttctgacaacgccaccaactggatcaacacctacatcaacggtgttctcaagaagattgctgtcgttgacaagcgtattcctctccagctccaggactgcttcaagggcgctagcttctgggctcctttctacgatgctagcaccaacatcgtcatggattcccacgtctactacttcgccgctgccggaacctacgccaactacgtcaaccctgctgtctgtggccaggcccagtacattgctcaggaaaccaagttccctgtcttcatcggcgaatggtctcttcaggctatgtacaacaacaccttgaacgtcgctacccgcaagaccttgttcgacactcagcgctacgcatggcagaagtatgttgccggcggatccttctggactgctgtttcctactccactgccaccgttgatggtgagggcacacagagagattattggtcatacgtcgacctcatcgctgctggagttatcactaagcagacaaatgcctcttactgctag

SEQ ID NO: 2196 - DNA, 6009 bp, Aureobasidium pullulans; identical to SEQ ID NO: 1809

SEQ ID NO: 2197 - DNA, 1164 bp, Aureobasidium pullulans
atgaagacatcagccattctcgcagcttgtgcttctggccttgccgtacaggcattcagtgtcccaagaatcgcccaaaatgccgctcagcaagtccaaggcttcatgtcgcctgagcagtacctgatcgaacttgccccaggcgagaccaaatgggtgacagacgctgagaagtgggctctgagaaggggaggcatctcgttcttcgatatcaccgacacgcctgaccttggttccgtgctcaagtccaatgccgcagtcaagttcccggaacatacccactacaactcgaccgtgaagagccttgcccgtaatttgaccaaatcgaacatgcacgatcacctcgagaccttcaccgccttccacacacgctactacaagagtgaatacggcgccaagtcatcattctggctgttgggccaggtcaatgacaccctcgcacacgcaggagctctgaagcatggagcaagtgtcaaacatttcgagcatgcttggggtcagaactcgatcattgccacacttcccggcaagaccaacaagacggttgttatcggtgcccaccaggacagcatcaacctcttcttcccttcgctccttgctgcacctggtgccgacgacgatggcagcggtaccgtcactattctcgaggcattgcgtgttctgcttcttgaccaggatatcatcgagggcaagcaagagaacactgtcgaattccactggtacagcgctgaggagggtggtcttcttggatctcaagccatcttccagacctacgagaagactggccgtgatgtcaaggctatgctgcaacaagacatgaccggttacgtccagaagactcttgacgctggagagcccgagagtgttggcgtcattaccgatttcgttgatcccggccttaccgagttcatcaagaaggtcgtcaccacctactgcgacattccttatgtccttaccaagtgtggttacgcatgctctgatcatgccagtgctagcaaggctgggtacccaagtgctttcgtgatcgagagtgatttcaagtacagtgacaacaagattcacaccaccgaggataagatcgaatatctcaacttcgatcatatgctacagcacgcaaagctgacccttggtctggccttcgaacttgcgtttgctaaattctaa

SEQ ID NO: 2198 - DNA, 690 bp, Aureobasidium pullulans
atggtctctttcaagtctttcttctgcgccttgatggccgctacttcggtgctggccgcccctttcgacttccttaccgacgaggttgatggaaacgcaactctcgccaagcgtcagagcacccccagtgctgagggtactcacaacggctacttctactcctggtggactgacggcggcggttctgctcagttcactctgggtgagggcagtcgctactctgtcaagtggaccaacactggcaacttcgtcggtggaaagggctggaaccctggtaccggccgcaccatcaactacggtggaagcttcagccccagtggcaatggctacctcgctgtatacggatggacccgcaacccgcttgtcgaatactacgtgatcgaatcctacggaacctacaaccccagccagggcgcccaattcaaaggcagcttctccaccgacggcggcacctacaacgtctacgtctccacccgcaccaaccaaccctccatcgatggcactcgcaccttccagcaatactggtccgtccgcaccagcaagcgtgtcggcggaaccgtgaccatgcagaaccacttcaacgcgtggcagaagaatggacttaaccttggaactcactactaccagatcgttgctactgaaggctaccagagcagtggttcttctgatatttatgttcagactaagtag

SEQ ID NO: 2199 - DNA, 1893 bp, Aureobasidium pullulans
atggcctctctagcaactaccgcaaccgctctgctcgctctcgctgtgccatatgcctccgctatcaatctcaaggtatcctcatctggtggcaatgcttcaagtcctctgctctatggcttgatgattgaggacatcagcaacagtatcgacggtggtctttatggccagactctacaaaacaatggtttccaaggagacagtccaggccttactgcatggacagccattggttcatccaccatttcacaagacaactcctcagctctttctgacgccttgccttcgtcacttctgatcaagtctaacggaacgagtggtactgttggtgcatcgaactcaggatacggtggcatcagagtcttacctgatcactacgccaactacttttatgtcaagggaagctacactggaaacgtcactctttccctcgtcggttcagacggtggtgtacttgcctcgacgcacgtttccgtcaacagcaactcgtcggcctttgggtactacgagacctatgacatgtatgccggaaaggctgctgctaatgggaacaatacctggcaattcacttttgatgcttcgctcgctaccgatggccagctgaacctcggtctgcctcagctattcccaacgacatacaagggccgcttcaatggtatgaacaacgagattgcaaccgtcattgatgagattggtggcaaatttttgagactgcctggtggcaacaacttggaaggagcctcgatcccggatcgatggatctggaacaacaccattggccctttgattgatcgtcctggaagacaaggtgactggacttaccctaacacggatggcatgggtcttatcgagtacctttactggtgtcaggacatgagtctcgaacctgttctcgcagtctgggatggcctggtcttggccgattcgggagccatttctggcgatgaattgaagccatacgtgcaggactcgctgaacgagcttgagtatttgacgggcgatacaagtactgagtggggcgctcttcgtgcatcccacggtcaccctgatcctttccacatcaactatgttgagatcggaaacgaagatatgttgaacaagggtcttgacaactatcaatcgcgcttcgacatgtattacgaggctgtccatgctgcataccccaacatcaccatcatttcatccgtggctccaggatcaactggcggcaatggtagtggcattaacgttccagaaggcgcgtaccaggatttgcatcagtacttgcctcccaaggacttcatcgccaacttcaacacctttgacaactgggaccgctcgcagcccttgttggtgggtgagtacgcatcgaccaccttcgacaacggcagtgcgaccatctggaccaacatgatgggttctgtctctgaagctgtctacatgatcggtatggagcgcaactctgacgtcgtcaagatggcttgctatgcgcctcttctcgagcatttcgaccgcgcagagtggtcgcctgacctcattggctttgacgcaactaccggtgtcactcgctcgacgagctacttcgtgcagcagatgtttgcatccaacaagggtgacaccatcttgtctgtagaatctgataccggctttggtcctgtgtactgggttgctagcagcgcaggcagcacgaactttgtcaagctggccaattacggtggtgatgagcagaatgttacattgaccctggacgggaagacatctggctcattggcagtcctaagcggagggcagtacgagtcaaactatcccggccaggagaacgtgaagcctgtagtgacagaggtgactggttcgaatggaacattctcaatcagcctgcctggctggtccgtggcagtgttgtcagccgagtag

SEQ ID NO: 2200 - DNA, 1389 bp, Aureobasidium pullulans
atgatccgcgctctcttgcttgcactgatcccctctgctcttgccatctccgaatggggacagtgcggcggcaccaactggtcaggctccggctcttgtgatgcaggattggcttgttcaagtgtcaacccctactacttccagtgtgtctctggcgcagctggaccgacatcgacctcgacctcgacaaagcctgtcacaacctctgcccgacccaccacgactacttctggtgcaggcacaaccttgattacgtctcgcacctctactgctacatcacctaccacctcagctgctggtgctaccaatgccgctggaaatttctttgctggcagacagctctacgcaaaccctttctacgcgtctgagattgccgccgccattccttctcttccagccagtctaaagccaaaagctagtgcagttgcaaagattggaacctttgtctggcttgacactgctgccaaagtacccaccatggatacatacctgaccgacatcgaaaagcagaacgctgctggagccagtcccgaaatcattggtggcttcgtcgtctacgatcttcccaaccgtgattgcgctgctctggcttccaacggtgaactgactgtcgcaaacgatggtctcaccaagtacaaggcatacgtcgattcaatcgcagccattgtcaagaaacactccaagaccaagattgttctcctcatcgagcctgacagtctcggtaatctcgtgaccaatctgggagtggccaagtgtcaagaagcccacgatacctacatcagtggtgttgagtatgccctcaagaccttgaacttcgacaatgtctccatgtacatcgacggtgctcacagcggatggctcggatggcccgccaacattggacctgccgctgatctctatgcaagtgtctacgcaggtgcaggcaagccaaaggctcttcgtggtcttgtcactgacgtctccaactacaacggtttcgatcttgccagcaagcccgtttacaccgagagcaatcccaactacgacgagaagcactacatcaacgctattgctcctcttctcaccgcccaaggcttcccagcacacttcattgtcgaccaaggccgttcaggcgttcagcctactgctcaattgcagcaaggtgactggtgcaacgtcattggcactggctttggtgtccgcccaaatacaaacaccggagatgcgcttgtggatgcctttgtctgggtcaagccaggtggtgaatcagacggaacttcggacacttctgctgccagatatgacgcccactgtggatatgcagatgctctcaagcctgcccctgaagctggtacttggttccaggcctacttcgagcaactactcagaaacgcaaaccccgctctctag

SEQ ID NO: 2201 - DNA, 1362 bp, Aureobasidium pullulans
atgatctctgcctctgcctctactttggcagccatcctggctcttggccatggagtcctcggtcaacaggctggcacctcgactgctgagaaccaccctcccatgagctaccaacgctgcactactggaggaacttgcacaactgtcaacaccaacattgtgcttgatgccaactggcgctggctccactctaccagtggatacaccaactgctacactggcaacactttcgacgcgtcgctgtgtcccaacaatgtagcatgtgctgccaactgtgctctggatggagcagactacactggaacctacggcattcaggccagtggaaactctgtcagcctgaagctcaagcaaggcaacaacattggatctcgtgtctacctgatcaacggcgacaagtacgagttgttcaaactgaagaaccaagagttcactttcgatgttgatgtgtctggacttggctgcggtatcaacggtgccttgtactttgtcaagatggacgccgatggtggtcttgccaagtacccaaccaacaaggctggtgccaagcttggtaccggttactgtgatgctcagtgccccagagacctcaagttcatcgccggaaaggccaacgtcgagggatggaagccatcgaacggtgacgccaactccggagaaggtaacaccggctcctgctgtgccgagatggatatctgggaggctaactccatctccactgctcttactcctcatgcttgctccaccaacggcccttgcactggcaacactacttgcggttctggcgagtcccgctacgacggctactgcgacaaggatggatgcgatctcaacccctacagattcggtgcacccaactttttcggacctggcaagactgttgactctaaatcgaagctcagcgtagtcacacaattcattactgcagacaacaccgctactggtaccctgaccgccatccgccgtatctacgttcagaacggcaaggtcattcagcaagccgacaccaacatccccggaatcacaaagaccaaccagatcaccgacaagttctgcaaggaacagaagaaggtcaccggtgaccccgacgagttctccgagaagggtggtcttgccgccttcggtaaggacctcgatgctggtatggctcttgtcttctctgtctgggatgaccacactgccaacatgctctggctcgactctacctaccccgttggatccaacaaggttggtgctgctcgcggtacttgtgccaccacctcaggcaagcctagcgatgtcgagtcccagcaagccaacgctgccgttaccttcagcaacgtcaagttcggtgccattaactccacctacaaagcttcgtaa

SEQ ID NO: 2202 - DNA, 1611 bp, Aureobasidium pullulans
atgcttttctcaagcattcttcttccggctcttacactttttacccccttggcttccgcagcctttggcctcaccagcaacaccgacagttatgttgtcgacgctggagcatcaaatacgctggtcgtgaccgtcaacaagaagagctgcgatatcacgtccattctctaccgtggcgaggagcttcagtacaaaagcacaggatcccacatcagctcaggtcttggatctgctaccgtgactggagaagtcatcgccagtcaatatgccaagatcacttgtaagaccagcacgttgactcattacatcgttgtcaagagtggcgacagcgccctgtacatggccacatataccacagcggaacctactattggcgaattacgattcatcgctcgtctcaactccaagtctttgcctctggagtatcctttcggtgccgcttcgaccattgctgggagtacttctaccgttgaagggtcggacgtgtttgttgttaacggcgagacacgaagcaagttctactccagtcagcgcttcatcgatgaccaggtgcattgcgtctatcgagatggttcggatccaatccatgcgtgtatggttcttcccaatcccgcgtatgaagcttctagtggtggacctttccacagagacatcaactccaacaacgttggcgattacactggtctctacttctacatgaactctgggcatgtgcagacagagtctttccgtcaaggccttcatggtccttatgctattgtgtttagtcgctcgggtatcccagcagtcagcagcgtcgatacatccttcttctcagacatccaagtcactggatatgtagctgactctggtcgtggtcgagtctccggtacagcctctggtattggaagctccttccagactgttgttcactggtacaacacaaacaatcagtactggacatatgcaaactctggcggcagctttacctccccacccatgcgaccgggtacctacacgatggtcctctatcagaccgagttcaaggtagctgagactactgtagccgtcactgctggatcaacagcaagtaagaacatcgcatctggagttactgcacgcaagaccatctggacgatcggtagctgggatggtcagcctactggattcctcaatgccgacaagcaacttcgtatgcatccatctgacaagcgcatgtccagttggggacctcttacatataccgtcggtacaagtaaattgacagacgtcccaatggcactgttcaaaggtgtcaatgaccccttcacgatcaaattcaccttatcagcagctcaggccggagccgctactctgcgcatcggtaccaccctggcgtttgcgagtggcagacctcaagccaagatcaacagctacagcgctgctgctcccgccgctccagtgaaaattgattctcgtggcgtgacgagaggagcgtatcgtggatttggcgaagtttatgatgtcaagatccctgccggtactctggttgccggagcaaacaccattaccataaccgttgcatcaggttcgagtggtgcctcatacttggcgccgaacttcatcctggacgccatagagttgtttcaatag

SEQ ID NO: 2203 - DNA, 2091 bp, Aureobasidium pullulans
atggcacccatcaagcaacttgccgccctgacggtagcggctgcctaccttccatatgcttcagcagcagcgatcgctccttcttctctttcgaatggacaaacttccttgacactgctttaccaaaacaacctcaatttcaccgatgatgtcaatcacatcagtgccatattgttggacccgtcaaccgcttccaatggagctgctggctgtgcagccttgaatgaaacgttgattccacagtctgctctgcaagcacactcccaagacttcatcaaccagctctcgtatgcattctacgccggtcgttcgacacaggatcaaaagtggcacattgctagcggccaaacagtgcaagtttccaacaaggggctcaaattcgccaaagcaggccctggcaatgtgttgccagtcctgtgcacgcagtccagccagagcaacactcccagcaatgccgttgcctctgcagccaacgagatcaagatctcctcttccggcaatacctttgtaggcttccgtaacaagaagtctttccgtttccagggcattcctttcgcggatccaccagccagattcgcgtactcgactgtgtactccaagactggccagacgattgatgcaacaaagtacggacctgactgcgcgcaaccgtacgagagttccagcagtgagaactgcttattcgtcaacatccagacaccttacatccccaaggctggatccaaaaagaaccttcgtcctgttcacttctggatttacggtggtggattcactggtggctccggtgccagttcaggtagcgatggaggtcaattggcttcgagagaggatattgttgtcgttgagatcaactaccgtttgaccactctcggcttcctcgcgattcccggaaccaacatcaccggcaactacggtatctctgaccaggtcactggtctcgactgggtcctcaagaacattgccagctttggtggtgatcctaacaagattgtgatcaatggcgagtctgcaggtgccggctccgtgcgtacacttctgggctcccctaaagccatcggaaagttcagaggctccattgccatgtcaaacctcggcggtggtgtcgatctgggtctgactggcaactacgcaaccacgtactcttcgtacttgacacctgcccagtcctatgcaaggagcgaggccttgtttgaggagattggctgcaatcagaccactcttgatgctcgtatctcttgcttgagagctacgcctgcacagacgattgtcaatgctgccaccgtcgccagatatgtcgttcaggatggtgtctacgtcaataccgaggatttggacgtatacaaccgcaacggcagtgctgctaatgttaacacaatttggggaatagttgcaaatgatggcgcatccttctcgacctaccccaagactcctgtcaccagcgagcttgcaggtattcaagcggcattaggcatatcacaagccgaggcacaatcaatcatcgactctggactcttccctctctacaacactggcaacatcacgttggactcgttcaatgtttcgcagagagtggctactgacaaccaattccgttgcatcgatcaagccaccgtgtatgctggcgtagagtctggagcgttcaagacatcctacttctaccagatgcagagaagtgcgggtggttacgatcccaacaacctcggtggccctccggtcgagcctggatatccttatggcaatcccgagaagccgtacttcaagcttcacggttcagatatgccatgggttttcggaaacctcaaccctctgcgtgatgccaatgacctcaagtctgtgcagctggagagtggctactttgcctctttcgtccgctcgctggaccctaaccctccggccaactacctccaagttcgcggctacaccaacaccacccaaggagtccagcaaagtggaccctggcagcccgtcaccagcgaccagggtccgatgaagctgctagacttcccttcggtcactgccgatttccaggatctgccacagtgcgccttcctcaactatcctatcagctactatgtcaacggtggtctgtaa

SEQ ID NO: 2204 - DNA, 1752 bp, Aureobasidium pullulans; identical to SEQ ID NO: 1817

SEQ ID NO: 2205 - DNA, 1728 bp, Aureobasidium pullulans; identical to SEQ ID NO: 1818

SEQ ID NO: 2206 - DNA, 1092 bp, Aureobasidium pullulans
atgcatcttccttcgcttcttcttgccgctggttcggcaagtgttgttctttctcagcctcttactcgtctcagccaacgtgcaagcaagcttcaattcgtcggcatcaatgagtccgggcctgaatttggcgaggcaaacatccctggcacctacggaactgattacacctggcccgacctttctaccatcagcacctttgtcaacaagggtatgaacactttccgtgtcaacttcttgatggaacgactggtgcctaacaagatgatcggctcgctggatgccgcatatctcggcaacctgactgagaccgtgaatggtatcaccaaactcggtgcttatgccatcatcgtccctcacaactacggtcgctacaatggggagatcatcacgtcaaccgaggatttcgctgcgttctggaagacggtcgctgctgaatacaaggataatgacaaggtcatttttgacactaacaacgaattccatgatgagtcttctactcttgttgctcaactcaatcaagctgccatcactgccatccgctctgctggtgctacatcgcagtacatcaccgtcgagggcaatgcttacaccggtgcttggacttggaccaccactcagggcaccgatggcaagaccaatggcgaaaccatgggctctctgaccgacactgtcgaagacaagctcatctatcagatgcatcaataccttgactccgacggctccggcacttcttcaacctgcgtttcccaaaccattggcagtgaacgccttcaagccgcaacaacctggcttcgtgacaacaagaagatcggacttgtcggtgaatttgctggtgccgtgaacactgattgcgaagctgctgtcaaggacttgcttgcttttgtagctgagaactctgatgtttggactggcgctttgtggtgggctgccggtccttggtggggtgactacatgttctccgtcgagcctaaggatggagttgcttatagcacaaggtcgaccgtcgattttggcactggtgtcgccgaggtacattcttcccactccggcgatcgtgacgacggccaaagcacaacccagaaggactag

SEQ ID NO: 2207 - DNA, 1764 bp, Aureobasidium pullulans
atgttgttctctccctggcttgatactctcacatgcctgctcgcattcggggtgtctgacatcggcgctaccgtcctgcgacaaggcttctctaatggaccccctcctgcttccgagctacatcataccggacatcatggttctaattcgacaaagctgcatggaggtattgcttccgaaagcaccatctgcagtggtatcggtcgcgacttgcttctaaaaggtgggaatgctgctgatgctatggtcggaagtgtcttctgcgttggagtcattggcatgtatcattctgggataggtggtggtggcttcatgctggtcagaggtgccgatggagagtacgagttcattgacttcagagagacggcacctgcggctgccttccaagacatgtacaagaacaacacagatgcgagtatctatggaggtctggcaagtggtattcctggcgaggtccgcgggctggcacacttgcaccaaaagtacggcaagctaccctggaaggaggtcatgcagggtgccatcaagactgctcgctatggtttcccagtaactgccgacttggttcgctacatggcttctgctacggcaggccagacgtccaacttcctcgttgaggacccgaattgggcgattgattttgctcccaatggaacgctgctacgtctcaatgacactatcacccgccagcggtatgcttcgaccttggagactatcgcagagcgtggccccgacgccttctacaccggtcccattgccgaagccatgatcgagacactgcaagcagcaaacggaacaatgacgatgggagacctgaagaattataccgtcgccattcgcgacccagtagagattgactacagaggatacaagctcaagagtgtgagcgcaccagcatcagggggtgttgtgttagccatcatgaagactctcgaaggctacaacaacatgggagacgaagcatacctcaacctcagcacccatcacctcgatgaagcgacccgtttcggctatggcttccgtgccgagatgggagatcctctgttcgtcaaaggcatggacgaataccaagccgaaatcctgaacgcgaccactgcagcagccattcgaggccgcatctcagacacccacacactcaacacgtcagcttacgaccctaagaacctcgagattttggatacacccggaacttcgcacgttgtgacggctgacagttcaggcatggccatctcactaaccacaactgtcaacctcctgtttggcagtcagcttattgtgccttccactggtgtcatcatgaacaacgaaatgaacgacttctctatcccaggaactaagaacgccttcggtctcgagccctcagaaagcaactttgtccgccccggaaagcgacccatgtcctcgatcgcctgcactatcgtagagaaccccgacggctcgctatactttgttacaggctctgccggtggtagtagaatcatcacagcaaccctgcagaccctttggcatgttttggaccagaacatgaccgctgccgaagcattgaaagcgcctcgtctgcatgaccagctctcgcccaactatgtgagcttcgaatacgcatacgataatgctactgtggattacatgaagagtttgggacacaacgtgacctgggtagctccaggtcagagcacagcacaatgtttgagggtactgaacaatggcaccttcgacgtcgccagtgaacctcgacaattgaactcgggagcctacgctgtgtaa

SEQ ID NO: 2208 - DNA, 1212 bp, Aureobasidium pullulans
atgtatttttcaactcttgtgctcgcctcgttggcgactatctgcctctcagctcccagtgtatctgcggatcagcaaccaattggcgcttccgagcccaacaccatcagctcatcatggaccaaagaattgatctcgctccaccgtcatctcatcaccaccgaatccatcagcggcaacgaatacgacgttggaaagtggttatccaaatatctcaaagatgacgactggaccattgagactcaaaaggtcaacaacgacagctctcgtctcaacattctggcctatcctggaaaagtccgcaatcctgatttgttgatctccagccatatcgacactgtacctcctttctacccttacaaaatatactctaatgattccgagaccatcatttctggacgtggaagtgtggatgccaaggcttctgtcgcggctcaaatcatcgctaccaagaagcttctggcagagaagaagttgaagaaggatgatgttgccttgctctacgttgttggcgaggaggttcatggcgatggtatgcgtgcagccaacgcattggaattgacacccaagaccatcatctttggtgagcccactgagggcaaacttgctactggtcacaagggtatgctaggcttcaccatcaacgccttcggaaaggcagcacacagcggctacccctggctcggccgcagcgcaaacgaagtcctggtcaaatccctctccgccttgatgcaactcggtctcgaactccccaagagcgacaaatacggctccaccaccatcaacctcggtaaaatcgaaggcggtgtcgctgggaacgtcgtcgctcaaaacgccaccgctcaaatcgccatcagaatcgccgctggaacacctgatgacatcggcaagcgtgttgtcgaggtgatcaaggaggccactgaagagttcaaactccctggtcacgaagatgaggaaatgtttgaaattgtatttgcaggcaagggttacggtcctgtcgatatcaatcatgatgtcgagggctttggaactattaccgtcaactacggcactgacattcctaacctcgagaagctcgacggacagaagagatatctctacggtcctggatctattcttgtcgctcactctgatcacgaagccatcacactcaccgatctcaagactgcagtcaaggactatgagaagttgattctacacagctttgcataa

SEQ ID NO: 2209 - DNA, 924 bp, Aureobasidium pullulans
atgtttgcgaagaccttcgctctctttgccttcacggctcttgctgaggcatcaggcagttgtcctgctatctggtcaaccatcgcctcagatctttcacaatcattcattggcagcaacggatgtaccgatctcgcccgaggcgccatccgattcgccttccacgattctgcgtcatattcttccaaaacacaatactatgcacctgctactggtggcgctgatggatcgctcctcctgagttctgtggagatcactcgagatgagaacaatggtcttcagtcatactacggtttcctccaggagaagtactccaagtacaagtctcaagtcggtgccgcagacctagtccaattcgccgccagtgtggcaattgtcagctgtcctggaggtcccaaagtcccgacggttgttggccgcaaggatactagtactgcagcaccggataacctcctgccgaaagctttcggtgcgggcgctgcacaacaagtgctcatccagctcttcgaggacaagggtatcagtcaaccagagcttgctgctttgattggcgcacacactgcatcaaaggctgtggctcaagaggcctacggtgttccttacaatggtcctcaagattccacacctggtcagtgggatgtgaaatactactccgacacggacaaccaccccagtggtgtctacagctttgaatcagatgtcaacctttcaaaccccaactcgactgtaggccagactttccagagcttcgtcaacagtcagagcaaatggaatgcagctttcgcacctgccatggctcatctcagtgtcctcggcatctcccaagcagaccaagcgaacttcgtcgattgtactagcgcagttccatcaggatccaatgcgagaatgattcgtgcagcacccatcaacgacagaattagatga

SEQ ID NO: 2210 - DNA, 1104 bp, Aureobasidium pullulans
atgaagatgagagcctcggagttggtgaccgtgacggcattcatgagcggcttggcggcagcgcttccatcatctccatcttcaccatcctcatacaacaacctgaactactatttccctcggcagacggcgcctcaatatccatcttcatttgatcctctgagcaacaatgtgctcgccgtctactatggcaaggcacagtacaactcgaatccgtccttgatggacctttgcaatgacagcgacattgacatgatcgtcatgggcttcatccgacaattcaatgggcccaatgttcagcccacatttgacattgccaactgcagaacaccgtccaatcctgcggccaactttacaggcatcagctgccctgctctggcagccagcatcacgcaatgccagagcgtaggcaagaaggtcatgatcagtctgggcggctccaatgccaacctggtcctgagcagcgatgccgaagcgcagcaggctgccaacatcctctggaatgtctttggtgccggcactgccacacctaacctccgaccctttggcaatgtcactctggacggcttcgactttgacttcgaaggtggttctgacacatcttacgttgacgtgctgtcggccaacctgcagtcactctactccactgccagtcccgcccgcttcatcagcgcctctcctctatgcgccaataataccatcatgccctacgacttctacaagtacgccaacttcatctggccgcgcttctacaatgcaaacgcgtgcaaggctggcggcaagggcttcaacaattccgtcaccacatggtccaacttcctcatcgacgtcgactccgccattggtacaaactaccctcgcttctacattggcgctctcggctttgaaaactacaacaatggtggtggcttcgtcacacccgatgtctttggcgatctcgtcgagtacaccaagaaccgcgtcggcaaagcaaccttcggaggcgtcagcatctgggaaggcaccgatgccctgcaatcaaagaccgccgatggcagccaggatatcctcaatgtcgccaaagaggcactgttggaaccattcaccagcgatgcctgtgattga

SEQ ID NO: 2211 - DNA, 1125 bp, Aureobasidium pullulans; identical to SEQ ID NO: 1824

SEQ ID NO: 2212 - DNA, 1173 bp, Aureobasidium pullulans
atgccttctattctttctatcgcttctgctgcactggtgtgcttgtcggcagcgactgcttcccctcacaagcagcctgctcaaaaccaagtcgaccctttcttctacaagggcttcgatctgtcttcgctgcatatcctggagcttggcaatgtcacctacaaagacactgctcgtcgtaatgctacaagacctgccgaggatatccttggtgatggtggcatgaacactgtaagactgagaatctgggtcaaccctgagcctggacaatacgatctcgcatacacattgggccaagcccagcgtttcgctaagaagggctaccgtatttaccttgatttccatttctcggacacctgggccgacccaaacaagcaattcacacctgcagcttggacaaccagtagcgtttctgcactcggatcagatcttcgcgactacgtcaagtcaacccttattgccttcaagaagggcggcgttgatctctccctcgtaagcttgggtaacgagatccgccatggtatgctctggcctactggttacgtcgacgtggacaccgcaccaacctccgcccgcattgccaacttcacaaacctcgccagtctttggtcaaacgcacgcaagggtgtcgacgatgcagtcaaggctggtgtcaagaagccctccattatgatccacattgacgatggttggaacaagactctgcagctcgactggtttggcgcactgaccggcactggcaaagtcaaggccgaggattgggatgtctttggtttctcgttctatcctttctacggcaccgccgctactcttgacaacctgaaggatactctaaatgctgttgccaccaagtaccagaagcccgttcacgtcgtcgagaccgactggccagccatctgcgacggcgccaccgcacctgagctcagcgatacctccgtccctatcagccctgccggtcaaacggaatgggtgcaagatattgttagcgtagtcaagggcgtcactggtggttggggtaagggtgtcaactactgggagcctacttggttgaacaacaccggcttgggcagtgcttgccaagatgccattttgttctccgctgactggagtggctggccgaacaagatcattggatactcgagatcgagtgttaacatgttcgctggcaagtaa

SEQ ID NO: 2213 - DNA, 1245 bp, Aureobasidium pullulans; identical to SEQ ID NO: 1826

SEQ ID NO: 2214 - DNA, 2133 bp, Aureobasidium pullulans
atgcgccgtccgctcgctgtggctttgaccacgcttctgtcttcttcagctgctgctgtgccttacgccgagtacatccttgcaccgtctcagcgagatctttctcctgtaaaagtccaccatgccaatggaacagtaatcaatgccgctggagtgacgacttccggatctggaggtgcgaccttcaatagcgtctcagccgtaacttacgactacaccaagaacattggaggtctggtgtctttcatcgtcagctctagttcagacagcgaacagtacatcggaatatcctacaccgagtcatctctatggatctccccggatggttccgatgccacgcaaaatattgccattgacgagacattgtggttcaagatcactggaccaggcaattactcggttgagcctcttcatgaccgcggtggtttcagatacctcaacgtctaccacaataccactggcaatgttaccatcagccacttacagacatactttactgccatgccacatttccctgatgacggcattggtgagtacacaggctatttccacagcaatgatgaaaaactcaaccgagtatggtatgctggtgcatatactgatcaactctgtaccattccttccactgcaggaaactctctggtcgacctcgacgccaccgacccgaacacaccgacagtatggtggtccaacagcactttgaccaatggaagctcagcatttaccgacggtcctaagcgtgacaagctcgtctggcctggtgatttcgccatctctgtcccgggtgtgttcctgtctacagatgatgccatcaccgtgaagctctcccttcaacaactattcgctagccaaaacgccaccaccggagcacttccttggtttgctcaacccatctacgtgttccctgagaacagctttatcaactttggaaaggtagtcttcagcttcaactaccatctcttcacactccttggattgcacaactactggatctacactggtgatgacgaatacctacaacagaactggaacagattcaagcttgctctgaactacagcttgagttttgtggatgagactggattagccaacgtcacttcaagcttcgattggttaagagaaggcatgggcggtcacaacatcgaagcaaacagtattctaaagcacaccttggacgttgccatcaccctcgcttatgctgtgaacgatacttctcacatcgcaagctggacaaattcttccgcagctatcgtcagcgctgcgaatacacttctctgggacagctctgcttcgctatacaaggataatgagaccactactctacatcctcaagatggcaacgtgtggtccatcatttctggtgttgcgtctgcgaaccagagtactgatatttcgggcgccctcgctgcacgctggggaccttatggtgcacctgctcccgaagcaggaactactgtatctccgttcatcacaggcttcgaactgcaagctcacttcctcgccggtcaacctcaacgtgctatcgagttgatgcaatttatgtgggccgacttcatgttggatgacccgcgcatgacgaatagcacatacatcgaaggctacgatacaagcggcgcattgcactatccagcttatgccgacgatgcacgcatctcacatgcccacggctggtcttccggtcctgttctggccttgtcaacttttgcagtcggtctacacgtgctgaatgcaaccaattggattgctcacccccaacctggcaacttgacgaatgtggaagctggattcaaggtcgaccatggcacttattctggcaactactctgtcactgccaacggagcgagctatgtcctctctactccgcctggtaccaaaggaagtcttgtactcgacactcccggatgcaatgctattatcaaggtcactggtgttggtagtgatgttcgtggtaagcatggcaagaagttcaattgggcgaagcaggttcacggacataaaggtgcgacatcaaacccgtggaagtgtggtgtatggggaccatcccctccttcacatcaagatggcagtgctggcacaattacgattgataatttggctggtggaaactacactgtggacatcgtatgctcttga

SEQ ID NO: 2215 - DNA, 846 bp, Aureobasidium pullulans; identical to SEQ ID NO: 1828

SEQ ID NO: 2216 - DNA, 1173 bp, Aureobasidium pullulans; identical to SEQ ID NO: 1829

SEQ ID NO: 2217 - DNA, 675 bp, Aureobasidium pullulans
atgcacttctcttccctcttcgtcgccgcttcggcctttgttactgctcttgcagcccccgctgctgagcccgttactggtaacggcatgtcctcgctggtcgagcgctccactcccgccggaactggcaccaacaacggctactactattccttctggaacgcagggggcggaagcgttacctacaacaacaagggtgctggcgaatactctgtcagctggcaaaactgcaacaacttcgttgccggcaagggatgggccaccggctctgcccgcaacatcaacttcaagggtagctactctccccagggcaactcttacctctccgtctacggatggagcaccaaccccctggttgagtactacatcctcgagtcctacggcacctacaaccccggcagtggtctcacccacatgggtaccgtcaccactgatggctctgtctacgatatctacaaaggtgtccgcactcagcagccttccatccagggtaccgccaccttcaaccagtactggtctatccgcaagaacaagcgctcctctggaactgtcactaccgccaaccacttcaacgcctgggccaagttgggcatgaagctcggccagcacaactaccagatcgtcgctaccgagggttaccagtcctccggctccgccgacatcaccgtctcctaa

SEQ ID NO: 2218 - DNA, 1710 bp, Aureobasidium pullulans
atggccatcatggagggatggaaggacaagatggcttggccacgcctgatcgtctttatggtcgtcgtatttcttcttctcacgacagtgaggtccgtcataggaaagaaggaagcttttaaccttccagcgaatggacatcctggaaacgagaagcccgaaggagataccaaagtcaacatgtggtgtccaattgccgggccgactaccatcgaggacggcttgactagctcgacagagtttgcgaagaacaaagatctattgaaacagcaagtcgagcgtcttagcgcggcagtcaatgtgccttcagtttcttacgatgacaactatgaggttgataaagacccgagatggtatgctttcgtcaccctgcatgagacgctcaagtctcactttccccgagttcacgaaaaaatggagctcgagaaagtgcatagctatggtctgctccacacgatgccaggaagctctcaagacctcaagcccctcgttatcatggcccatttggatgtcgtgccagtcccggatccaacaagatggaagcatcctccattcgaagcatattttgatgggcagtggctctggggtagaggctctgttgactgcaagaacaacctcattggtatatacagtgccatggaacgacttctcgaacaagacttcaagagcaagcgtactataatcctgtcgttcggattcgatgaagaaactggtggcttcagaggtgccaaatatttggctgctcatctgaaagaggaatatggcgagaacagtatgggcatgattattgatgaaagcggatctggaatccgtacaattgacggtgtggcatacgcactgccggcaattgcagagaaaggattcctcgacatcgtcctgaccttgaacacaccaggcggccacagctctgcaccgcccaagaacacaaacattggcataatgtcccgcttgattacagccgtcgaggagcatccttttggtccccatatcgacgagcacaatcccttctggggctatctgaaatgcgaagtggagaattcgcccaaagcctcggagccatggctgcgcgaagccctagagaagaaggaagacttcgcagacagacttatcgattcacgtggagacaaggtccgctggtcaatccagacgtctcagtccgtggatatagtcaatggcggcatcaaagacaaccagctcccagagacgacagtcacgatcatcaactaccgcgtcttaccatcagacaaaatcgacgacgttctaaagaccgtcgccgacgtactagtaccactcgcaaacaaccatagcattgcagtccaaggatcaggttactcgcaaatcgacagaggtttcggcgtcctgaacatctcatcaagcaacatcctccaaccatctccactttcgcccacaggaccagatgtaggcgtatggaacatcttcgcaggtaccattcgacaagtattcgaaaacacaggtgaaaaactatcagcgaaaaaggtggtacctgtgggcacgatttcgacaggaaatacagacacagcgcattattggcagttgaccaagaacatctaccgattttcgccgaggtgggaaggtacgtctgagggtgtacatactgtggatgagagaattgatatgcaagctcatttgagtggactgaggttctactatgagttgattcggaatatggatagctttgtagataactag

SEQ ID NO: 2219 - DNA, 786 bp, Aureobasidium pullulans
atgaagttctccgccatctttgtcctggcttctgccaccgctgccatggccgccaactccactcccgctcttttcgctcgtcaatcgaccggtaccacctgctctaacggagagtccgtctgcggttctggatgctacgaccccactgcctacatctgctgtggtcaggccggtcaggtctgcgcttccggcaactactgcgccagcgccgaccgctgctgccccattggtgccaactgtgacggtcagggtacctccactgcttcgggtgtttctgccaccgccatccaatctggatctactatcctcggaagctcagcctcatcggcagcagctgccactgcttcgcaatcttctgtttcgcagtcatctgcttctcagtcgtctgcatcgcagtcttcctctgtttcttcttcccttgcatccgctttatctgtctcatcttccgtctcgtcctctgtatcctcagcagctgcatcttctctttcatcgagtctgacatcaagcgcctcagccgcctcttctgccgcaagcagcgcctcttcgtctatgtcgagcgccgcctctagccaatcttctgttgcttcatctgcttcgtcctcggcatcctctgccgcttcatctgcatccagatctgctacatcttcggccgcatctgcttctcgctccgcttcatcggctgcctcctctgcatcctctgcagcagccacttcttccggtgctgccgttgctggaaccgctaccaacttcggtctcgctcttctcggccttgctgccctcatctaa

SEQ ID NO: 2220 - DNA, 1062 bp, Aureobasidium pullulans; identical to SEQ ID NO: 1833

SEQ ID NO: 2221 - DNA, 2724 bp, Aureobasidium pullulans
atgaagtccttcggtagtacctttgccagcgttggccttgtggtgcttccactaatcgcttcagtcatcagtgcttctaattccacgtgcccaccagcagttgattataccgcagattttgaatatgtaaaatgccgtcaagatagctactatggtcgcattctcggcagagaacgtaaagttatcttccgcgacacaaacactccacagtattgtgccgactactgcggacgatctggctacccgtgggctggtgttgaagccgggactcaatgcttctgcggtggccaactagatggcggagcaataaccgggaatgccaactgttcgacctatacttgctccggggacaagtcacaaaagtgcggtggcgcattcttcttgcagctgtacaagataaacaatccgcttccggtcgaaaaggtcgatggtgatgtcaaacgtcagcctctctgtcacacaagcccattatgcgagcacacagtctgtgatacatcactccccatctcagagagaattgggtcgttgttgtcagagatgacacttgatgagaagatcgtcaatactgtcaatgctgctgacggagttggaagacttggtctaccaggctacgactggtggaatgaagctctccatggtctcgcacaagcccctggtgttaagttcaacagtcctaacggatcggcattcagctatgcaaccagctttcccatggctatcacgactggttcggcgtttgacgaccctcttatcggtgaaatcgcaaatgtcatcggaagagagactcgagcttttgccaacttcgagcaatgtggatatgacttttggacaccaaacataaacacattcctcgatcctcgctggggtagaggtcaagaaacgcctagtgaagattctttccatacccagcaatatgtcaaacaattggttcccggacttcaaggaggcctcgatcacccagaagagaaacagatcatcgctacatgcaagcatttcaacctgtattacgcggaaacaaaccgttatggtgagaactataatgcaaccgcacaagacctcgctgaatacttcaacgcaccgttcaaatcttgcgtccgcgatgttgctgtcggatctgtcatgtgttcatacaacgctgcctatggcgtccccagctgcgcaagtgagtacttcctacaggatactctacgagagaactggaatttcaacgagccctacaaatacgtagtcggtgactgcggtgctgtcgagtacattcacaccattcacaacttcaccgattcacctgctgaaggtgctgctattgccttgaacgcggggaccgacctcgactgcggccttacattcggcagctatctcaacgagtcaatcttcaacaactatactacggaggctcgcttgaaccaagctttgacccgcttgtacactgggcttcacactgtcggatattttgatggtcataatcgctatgctaatctgtcgtggagtgatgttgctactgaagacgctcaagctctcaactatcggtcagcttgggaaggcatggtccttctcaagaacgatgggctgttgcccctttcggcaagctacaaaaaggtggcactcatcggaccttatgccaatgcatcgagtcagatgcagggaatctatgctggccaagcaccatacattattactcctctacaagcagcagaagccaattgggatagtgtgcagtatgcgtttggcacaggtgtcaatggaagcaacacgacatttttctccgaggcactggaagccgcaaaatcagccgaccttatcatctatttgggtggcatagatgacactattgagcgagagacaatggaccgcaagtctctcacctggcctggaaaccagcttgatctcgtgcaacagctcagcgatcttagtaagcctcttactatcgtgcagttcggaggcggtcaaatcgacgacagcgagctacttgccaacgacaatgttaacgctctcttgtgggcaggttatcctggccaagaaggtggcaacgcagtcgttgatatcttgctcggcaaacaagcacctgctggtcgcttgaccacaactcaatatgctgccagctacgtcggtgaagtcagcattttcaacccagacttgcgcccgaacggaagctatcctggtcgcacgtacaaatggtataccggcaagcctgtccttccctttggctacggactgtcttacacgacattcgacctcgcatggtgtggcaagcctctcaaacaatcctaccgcatcagggacttgttcaacaagcgtcaacaccatggtgcaaagcgcacacctctggacactctaccttatgtcacgctctcgaccactgtctccaacacgggaaatctcacttccgacttctcggcccttctcttcctctcaacttccaacgcaggtcctgcaccctatccgaacaaatggcttgtctcttacgctcgagcacatggtatcgctcctggtaaatctgaaaccataaatctagacatttcaatcggttctctggccagagctaatgagaatggagagttgactgtttatcctggcaagtatcggttggctatcgacaacgatgagttgttgaaggcggagtttgagttggttggagagcctgtcatcgttgatcggctgactcgacagggagtttatgagtacactgttcctgtgcactacaatgctagtgctaatctggtgtga

SEQ ID NO: 2222 - DNA, 1203 bp, Aureobasidium pullulans
atgaagggcagttctctcatggcagccggtgcgctgtttggctcggcttcggctggtgtccacaagatgaagctcaagaaggttcctctgtcggagcagcttgagggcgcaaacattggcgagcacatgcaggctctcggccagaagtacatgggtgttcgcccccagaagcacgccgacgagatgttcaaggagacctccatgcacgctgaggccggccaccccgtcgctgtcagcaacttcctgaacgctcagtacttctctgagattgccatcggcaaccctccccaggagttcaaggtcgtcctcgacactggcagctccaacctgtggatcccctcgtctgactgtggttccatcgcttgctatctccacaacaagtacgaccacagcgactcttcgtcgtacaagaagaacggctccgactttgccatccgctacggctcgggtgctgttgagggttacatctctcaggacactgtccagattggtgacatcaagatcaagaaccagctcttcggtgaggccactcaggagcctggcttggctttcgccttcggccgcttcgacggtatcctcggtcttggatacgactccatcagtgtcaacaagatcccccctcctttctactcaatgattgaccaggacctgctcgacgagcctgtcttcgccttctacctcagcgacaccaacgacaaggaggctgagtccgaggccatcttcggtggtatcaacaaggaccactacaccggcgagctcaccaagctccctctgagacgcaaggcctactgggaggttgaccttgacgccatcaccttcggcaaggagagtgccgagttcgacaacatgggtgccatcctcgacaccggcacttcgctcattgcccttcccagcactcttgctgagctgctgaacaaggagatcggtgccaagaagggctacaatggccagtacactgtcgagtgcagcgcgcgtgactcgctccctgacctcagcttcaccctgaccggctacaacttcaccattggcccctacgactacatccttgaggtccagggttcgtgtatctcgtccttcatgggcttcgatatccccgcccctgctggtcctcttgccattctcggtgatgctttcctccgcagatactactccgtctacgacctcggcagcaacagtgtcggtctcgccaaggccaaggcttaa

SEQ ID NO: 2223 - DNA, 1230 bp, Aureobasidium pullulans
atgttttcagccaagattgctgctctggcagcccttctccctgcaacagcattcgctgctagcatagtaggcaatggctcttcagtcctgtccaacggcaaatacgagatctcatctgagggaatccgcgcccagtttatcccttatggcgcatccatcaccaacctcttcatcagagacgttcacggcattgagcgtgacatcgttcttggttgggacaatgctacctactacaccgaggacaagaagcacccccatctcggcggtgttcccggacgctacgccaaccgcatcaagaactcgacctttgagattgacggcaacgtctaccacactgatgcaaacgagaacggaggccttgacaccctgcacggtggatccaacggctgggactggcgcaactggactgtgtctgcccacaccaccgattctatcactttctccattgtcgaccccgatggcgcagaaggcttccccggcgaggttatcagctacgtgacatacacccttactccttatgaatggcacttcaaaatgattgcaattgcaactaccaagaagacccccattatgctgagctcccacgtctactggaacctcgacggcttccaaaatcccactgatcctactgtcaacaactacaccgttcacttgccttactctggccagcgcgtcgctgtcgatggtatcctcattcccaatggaaccatcttgcctaacgagaagggtggtgtgttcgacttctggtcatcacccaagaagcttggtgccaatctgacttcccctgatcttgttggtggctgcggtaccaactgcactggctacgacacatgctggctcgtcaacagagatcaaaacggaccctacgactggcgtgagtcgggacctgttgccactgtggctagtcctttctctggtatccaaatcgatatcttcaccgaccagcaggctttccagatctacacctgccctggacaagactctacacaaagcatcaaagagactcagggcttcttcaaccagactagccagcctagagttgtgcagaagtatggttgcatggttatggaggtcgaggactggattgatgccatcaaccagccggaatggcaaagagagaagaaaaacatcttcggccctggagatgacccatacgttctccaggctacttacaagttctctttgaacaaagacctggccgctacttacagcaacacatcgagctactaa

SEQ ID NO: 2224 - DNA, 2337 bp, Aureobasidium pullulans
atggtccgtctctctaccaccagcctggcattagctggtctgagcattgctcaagcacaatcaaattcgtctttggtcaatgccatctacaaagatgcatctcaatctgtcgatgcaagagttgagaacctcgtatctctaatgaccttggaagagaagatggctcaattgatgcaaggtgacatctccaactggctcaacacgacttccggtgaatacaaccagaccggtcttgagttcaacttcgagaaccgtggtggcatgttctatgtcggctacccaatcacctgggattggcttgcagaaggcatcaaagtcggccaggactacgccgtcaacaacactcgccttggtatcccggccattgtccagactgaaggtattcacggcttcctgatcggaaatgcgacaatcttcaactcgccgattgctcaggcttgctcgttcaaccgtgagcttcaacgtcaaatgggcgaacagattgccatcgaggctgctactctaggtgtcacccagctcttcgctcccctggctgatcttgcacgcgaactacgttatggtcgtgttgaagagacctatggtgaggatggttacttggctggcgagatggcctacaactatattgttggttgtcaaggtcaaaatgtctcggctatggtcaagcactttgctgcctactccgagccggaaggaggtctcaacactgcacctgttcatggtggtgagcgtgagctgcgtactacttggctaccccctttccacagagccatcattgatggtggtgcttattctatcatgtctgcctaccatgcttatgatggcattccggccgtggctgactactttatgctcactgagatcttgcgcaacgagtggggctacaagtactttgtatcgagtgatgctggtgctactgaccgtttgttcaagaacttcctgacctgtggtgtcaacgacttcgaatgtgtcactgagcaatgcttgaccgcaggaaacgatgttgagatgggtggtggttctttcaactttcgtagtatcccacaactccttgggaacaagacaatcgacatcagcgtcgtcgatgaggctgttgctagagttctgagagtcaagttccagatgggcctgttcgagaatcccaaccctgctgctcctaaggaccagtggaacagcctgatcaacaacgctgccgccaagaagcttgctcgcgaccttgatgcagagtcaatcgtgcttcttcagaatcctaacaagacacttccccttagtaagaccgacaagatcgctgtcattggtcccatggcctccggtttcatgaactacggcgactatgttgtctatcagtcgcaatacagaggtgtcgagtacctccaaggcatacagaatgctgtcggtccttccgccaatgctactgtttcttatgccaagggtgttgagagatggtcgaccgatgagtctggcattcctgaggctgtcgatgctgccaaaaaggctgatgtggctgtcgtcattgttggtacctggtccagagatcagcgtgagctgtggcaaggattgaacgctaccactggcgagcatattgatgagagtgacctgggccttgttggcgcacagagagctcttgtcaaggctgtcattgacacaggaaagcccaccgtggtcgtcttctcttcaggcaagcctctcactgaagactggatctcaaacaccacagcgtctctcgtccaacaattctaccctggcgaggaaggaggcaacgccttggcagacatcctattcggcaaggtcaacccatccggcaaactttccgtctccttccctcacgatgtaggcactcttccagcctactatgacttcctgaacagtggtagacccacctatcctggatacgtcggcggagatggaaacctctactttggctccagctatatcttgaacactcctgtaccttggttccccttcggctatggtctctcatacacgtctttcgactacagcaatgtaacactctcctcgtcgcaagtctccgcgaccgactccatcaccgccactgttcacgtcaccaacaacggcacttacgacggagccgaggttgttcaactttacgtcaaggatctggtagccagtgttactgttcctaacatccaactcaagggtttcgagaaggtgtttatcaaggctggagagactgctgaggttgttattccgctggagatcagtgacattggtctatggaacaagagtatggattacgtggttgagcctggcaactttactgtcttcattggcagtagctctgctgatttccgtactaatgctactttgacggtggtgtag

SEQ ID NO: 2225 - DNA, 1185 bp, Aureobasidium pullulans; identical to SEQ ID NO: 1838

SEQ ID NO: 2226 - DNA, 1497 bp, Aureobasidium pullulans; identical to SEQ ID NO: 1839

SEQ ID NO: 2227 - DNA, 2511 bp, Aureobasidium pullulans
atgaagcattccatcctgctcctcggccttagcgccagcacggcgcttgccaacatctatttcccaaaagtccaaccgacttgcaacagcgaggaccttagttttagtgggtgtttgaagggacaattctgccagcaaaacaatacatgcactgctgtcaaacacgcatggccaatgtcattccaagatcacggcaaaagaggcttgttcaaacatagagccaaggctcccaactattcacaagacggcaaatgtggcccgaataatggcaatctcttatgtgatcctaacagcacagcatacaagggaacatgttgttcatcatatggatggtgtggtgatactccagctcattgtggaagtggctgctcgtctggttgttcttccagctcagcggtcgtagcatctacaatcccgaccaccacaatcaacagggccgcaccttcagcctccggtgctgcccctcgcgatgacggcagatgtggtcctgaatttaacaacgccttgtgtgacgccaagggcgcttatggtggttgttgctcctcttatggatactgtggtaacactgacggacactgcttgactgccaatggatgtctgtctggttgtaaagacgccgcaccaaccagcgctgttcctacttctgccgctgcatcgtcagtcgctccttctaacatagactccgctgctccatcaagcacaactggtgagccagtcatctctgcagcaacatcttcagctggtagtgctccaacaggcgtagttacaacggatggaacatgtggtgccacttacgaaaacaccatttgcggtgactggaagcaaggtagctgctgctctatgtacggatactgcggaaacagcactgctcactgtggtgatggttgtcaaagtggaccttgtctgaatggtgccgttgttgcggctcctggccctagccctgcacctgtcaatgctaacccgggacgtttcgacatcgttggcgagtctggtgttcctgccatgcatgccggtctccttcccaacggcaaagttgtctttcttgacaagatcgaaaactacacgaacatcaagctccccaatggccagtacgcttactcgaccgagtatgaccccgcaactaacaagtacaccgctttggcttacaagaccaatgccttttgtgctggtggctccttcctcgctaatggtcaattcatcgctcttggtggtaacggtcctcttgacttcattgacaccactgttggagacggctttgacggcatccgctatcttacgcgttcttcttctgacgcttctctggacggccaagactggagcgagcctggtaacaagctcaacactaagcgctggtacccttccgtccagaccctgcctgatggtaggctctttgtcgcttccgggtcgcttaatggactcgaccctactgtgccggccaacaataacccgacttacgagattttggacaagaatggaaagtcttctggtgtctctgttcctatggagattctggtcaagaatcaaccttactatatgtacccattcatgcatcagctcaaggatggctccctcttcgtttttgtttccaagtcgtctgagctctttaacgtcaacaccaacaccacagtgagaacctttgccgaccttccaggagactaccgcacctaccccaacacaggcggctcagtcctccttcccctttcatctgcaaacgactggaaccctgatatcgtgatctgcggcggtggcgcataccaagacatcacctcccctaccgatcccagctgtggccgcatgcaaccactttctacaaatgccaaatgggaaatggacagtatgcctcaaggccgtggcatggttgaaggtacacttctccccgacggtaccgtaatcttcctcaacggcggcaacgaaggcgcccaaggcttcggtcttgcccgcgaccctacattcgaagccctcatctacgacccagcaaaacccctcggtcaacgattcaccactggcgcttcttcaacaatccctcgtctctatcattctgttgctctgcttcttctagatggcacattgatgattgcaggatccaacccagtcgagcaaccagtcctgaaacccacaaccacagacccctacgtcactgaattcagagtggaaatctacacacccccatacctccaaggcgacaatgccaaaaagcgtcctacagccatcaccctctcctctaagtctttggtcgcaaactctcagactttcactgtcaagttcactgctcctactggtgctaaggctgtgaaagtggcgctctatcatggaggtttcgtcacgcattctgtgcatatgagtcatagaatggcgttcttggatactgcgggttggaaggctggagcgacggatcagcaaatcacggttaccatgcctccgagtgctaatgttgcgccgccgggtccgtatgttgtttatgttgttgttgatggtgtgcctggtgttggacaattcgtgcaggtttcatag

SEQ ID NO: 2228 - DNA, 1398 bp, Aureobasidium pullulans
atgaaaaagtctggttttgttacactctttctatccgccttgtctctacttgccgaggcaacaggcagcgaaaattatgacttccagacattatccacagccggtagagctcttgccggcaatggtactgtcgagattgacttgaatggcaaatacgtaaccgaaaatggcatggcttactttctcgacattctggttggcacccctggtcaaatgcagtcagttatgatcgatactggtagtagcgacctcatcgtcactgcatcgaacgcttctgcctgcatcactatttgggggtgcgcaggtggtacgttcgatcccgtgaagtcgtcaacatttggcaccgtcactcccgatgggttgtacaagacgtacgccgactactctcggaaagttggtgactatgtcacggatgttacccaaattggcgatgtcccgatgactggcgctccactggggcttgcctactacaccaaagactttactggcgtcaactttggaatcatgggacttggctactccagcaatttgactggtaacgaggcagtcgaacctgacgagcaatcatacattcccacgtttgttggaacactcgttcagaagggtgttgttgcctcacgtctattcagtctctacctcaaccagctgggtgaacgtggctctatcatcttcggcggcattgacgtcgacaaattcagaggtcctttgaccactctcaattgcttggcagataacgacacggtcaaagacttttacttgaacctcgaggaagtcacggtgcaatctagcaacggaggtagccaaagtcttatgcgacctacggggcaaaagccctatcccgtcttgttagacaccggaagacttgactggagcgtaccgacggacgtctatgagaagattactgaggccgcaggggcatttgaagccaacgatacgaaaacggaacgtgaatggctcgagaagccttgcaatgatctggaccgtggcggcatcaacgcacctcacatacagctcacattttctggcaacggatccaacactgcaactcttgaccttgaaatggccgacctcttcgtcccaagactgaaccaagacgggagtgctatgaccaacgatgttggtcaagcgctctgcgagctgatagtgagagattatggatcaccaaagggtcttgaccaagagggtggtgtagccataggaaacgttgtcacaaggactggttactttgttttcgaccttgacaacggccagatctccatggcacaggccaatttcgcggcgaactcctcaaacgtaatccacgtcgaagcgggggctgacggtctgaagaaagcattcgacggcctcatagccgagactcagacaaaccatgtcgcgggacaacctggccgttggtag

SEQ ID NO: 2229 - DNA, 1026 bp, Aureobasidium pullulans
atgttccgaagctcggcgtatgttctgttattgctgtacacggtagtcagtcttgtcagatgtgatccgttcaatgatcaaatatcgctgtcgaagcgaacgacaattggtctcgctatcacggcaaactttccggatcccagcatcatcaaagtcaatggtacttggtatgcatttgctacacatacccgaggaaccgacatcaaaatccaagttgctcgatccccggacttcgagaattggtcgataatcaggaacgtcgatggttcgcagtttgatgcgcttcctgtacttcctgcatgggtgcggatggcgaactacttgacctgggctccagatgtccaacaactcgatgatgggtcgtttatcatgtactattcggccactgcagcggccagaccagacggatcaaaacactgcgttggggctgctacttcaccaacaattctcggaccgtatacggggttggcagatgcgcttttctgtccgctttccagaggaggagccattgatgcttcaggattcaaggataggaacggtaaacgatacgttcttttcaaggtcgacggcaacgctgttgggaatggcggcgcgtgtgggaatactgttctcccaatcgttggtacacctttgatgcttcaacctgtggctgcggacggtcatactttcactggcaatgctgtcgcacttctagacaataacggtcctgcggaccaaggcattttggaggctccagttttgactcgctctcgagctggtgtctactttctctttttcagcagtggttgctttgctacatcaggatacacagtgtcttatgcaactgcgagcaaccttacagggccgtacacccgtgcagatggcccgctgttcaggactggtgatggcaacggactcaaggctcctggtggcatgtcagtatggggcgataacagacacatggtgcttcatgcgaattatggaaacggtcgcgccatgtataccacgttcatagcactgaagggtacagaagtcattaccatgtga

SEQ ID NO: 2230 - DNA, 1788 bp, Aureobasidium pullulans
atgtatctcttgcatactcttcctcttcttgcttcctgggtcgcctatgctgctggttctgcggccatgaagcgtcaggcctcctcaacctcgtctgctgctggctctgccacaaccctgactccagacgatgcggacacagaatgtaccaacggcccccacagccgtgcatgttggggggatggtttctctatcgcgaccgacttcgaccaaaagtggcccgacaccggcaagactatgccgtacacgctagatatcacaaacactactcttaaccccgatgggacgggtgaccgcttggtcatgttgatcaacaaccaataccctggacctgttattcgggctcaatggggagattggctcgagataactgtcaacaacaagctacccaacaatggaacaggtattcactggcacggtattagacaattcgagacgtgtgatcaagatggtgtccctggcataactgagtgtccgattgcacctggaacatctcgcacttatcgtttccactgcacgcaatttggtacgagctggtgtgttcaatatggtgtaggtacacttggcacgcttgtaattgatggacctgctacggacaactacgacgaagaccttggaccgttcgctctcactgactggtatgatgagactgctttcttcaacagcccgttggcccgaactgcacctccacagccttatacaggcctggtcaacggaatgaacgtcagtcctgatggaacgaagggaaagtactacaatgctacggtcaagtcagcaaagaagtatcgcctccgactcatcaacacatctgtggacagtgctttcatggtatcactcgacaaccacccattcaccgtcatcacgagcgacttcgttcctatcaaaccttacgttgcagaacgtgtgtttatcggaattggtcaaagactggacgtcatcatcgaagccaatcagacagcaagcaactactggtttagagcagatgtgccagccggtggatgcggcagcaatgcaaaccccaaaggtatcagagccatcatccactacgacaatacaaccttcggtaaccctacaagtactgcttgggacacgactggtgccaatgcagatcgatgcacagacgaatcatataattcgaacaaactggagccatattgggatagctttgttcccagcgatgccttgacagccaaccctacactgttgagtgtacaggctcaagaggcaggccttaccactgacaataaaactatcttcagatgggccatcaacaccacggcactcaatgttgactgggacagaccgatccttgaatatgtccaagaaggcaacacaagttaccctgcttatgagaacttgatcaacgtgcctgacgtagaatggacgtactgggtcttgcaggagatcagcactcccggcggcataccattgaacattgtccatccactccacctccatggacacgacttctacgtgctaggtgctcaagggaacagtgtgtacaccaacgcgttgtcgggtcagctgaatttcgaaaatccaccccgtcgtgacaccgcgatgcttccagctggtggatggctcgtcctcgccttcgagaccaataatcctggtgcctggatcatgcattgtcatattgcctggcatgtggcagacggtctagccacgcagttcttggagacgccagaccggatcaaggtcgatcctagcttcaacgagatatgcagtgcttggagagactactaccctgagcatgctgtctaccttaaggatgactccggtgtttag

SEQ ID NO: 2231 - DNA, 1110 bp, Aureobasidium pullulans; identical to SEQ ID NO: 1844

SEQ ID NO: 2232 - DNA, 2409 bp, Aureobasidium pullulans
atgtatcgccctttgaacaccattgctgcggctctgactgcaattggtctggccggagcgcagaacagcagctggaatcatgagctttacacctctagccctccagtctatcctagcccggaaacagctggcattggatgggagactgccttggctcaagcagagaccttcttggccaatctgactctggaagagaaggctggattggtcactggttctgccggtccttgtgtgggcaatatcgccccaattgagcgtctaggcttcgacggcctttgcttgcaggatggacctctcgcaatcagacaggctacctatgcttcagtcttccctgctggcttaacagctgcagcctcttgggacaagggcttgatctatacacgcggattatacatggctcaagagttcaaaggcaagggagctaatatagctctcggtcctgttgtcggaccattaggtcgccatggccgtggtggacgtaattgggaaggtttctctcccgatccatatctgagtggtgttgctgtcgagcagacaatctggggcatgcagtcgaccggagtccaggcttgtgtcaagcactacatcggcaacgaacaagagactcagcgcaacccatccactcgcaatggaacaactatcgaagctgtttcatccaacatcgatgatcgcaccatgcacgaactatacgcctggccattcgccaatgctatccgaagcggtgtcgcatctgtaatgtgttcatacaacagagtcaacggttcgtatggctgtgctaattccaaaacattgaacggtatcctcaaagaagagttcggtttccaaggctatgtcatgagtgattggggtgctactcatagcggtgtcgcatcgataaacgccggcctcgacatggatatgccaggcactattggcttccgtgcagggggcaacagcttttttggcggtaacatcacgactgccgtcaacaatggatcactttctgaagaccgcctcgacgacatgatcaagcgtattatgacaccatacttccatctcaagcaggacaccgactttcctccgatcgatccaagcgagattcctctcaacagcttctttggtgctgccgcttccactgttgcattccctctgggctcagtcgcgaatgttgatgtccgtgagaaccatgccactctgatcagggaacttggctcagctggtactgttttgttgaagaacgtcaacggtgctttgccattgaaggctccaaagaacattgcagtattaggtaatgatgctggagacattctgaacggcgaatacttctctgccgcaccttatcagtctaatacgttcggatatgagtacggcacactgcccgttggtggcggtagtggtacaggaagattatcttatcttgtcgacccactcactgctatcaaagctagagctgcccaggacggtagtctcgtacagtatatcttgaacaacactctgttgtcaacacctcgtggtcttgcgtccctccagccaacaccaccagatgtatgtctcgtcttcttgaagacctgggctgaagaaggcgaagacaggagcacgcttctggcagattggaacagcacggcagttgtcgaatcagtggctagcgtttgcaacaacaccatcgttgtaacccattcaggcggactgaacatccttccttgggcagagaaccccaacgtcactgccattctagcagcacatttacctggcaccgagacaggaaactccttggttgatatcctttacggtgatgttaacccaagcggtagattgccctacacaattgccaagacgcaagaagactatgcttttgccgacatcaccaacagcaccgctcttgttaccaccagagaccccaacgcgtggcaatctgatttcaccgaaggtctcttgattgattaccgccatttcgactactacaaccaaagcgtccagtatgaatttggcttcggtctctcgtattccacatttgacatctcatccctgagtgtcagcaaggtctatggtggctacaacatcagcagcactcctccccctgccaagatcatccctggaggtaaccctactctatgggatgtcctctaccgagcaacagtgaccgtatcaaacacaggagatgtggctggtgctacagtaccacagttgtatttgtcactccctcaggttcccggcgaagatcccacaccgctcaaggtccttcgtggcttcgagaaggtcagccttcagccagggcaaaaaacggtagtcaacttcgatctcaccagacgtgatcttagttactggagcatctatcaacaggactgggtcattgcaggaggagagatcggagtctcggttggactgagcagcagagacatcaaggcgacctcctcgatccgagtcctttga

SEQ ID NO: 2233 - DNA, 1011 bp, Aureobasidium pullulans
atgcctgtcttcaagcactttcttcttgcatctgtgaccttgtcagtgggggtgtccgcagccccaaagaagaccaagttcaactggcacgacacgaagcatgtaatagcatttggtgattcgtacacatatgtacaaggcacagctggccgacaaaactcgaccttcatcggcgactacttcaacttttcatttacggaagaggagttgttgcacaacaagattgttcaaaatcagactgcgacggctgagggaggtccaaattgggttgagtatctcacgggctgtgggctgaagccaggcctcacatcaccactgtcatgtaagacacaactctgggactttgcatttggtggcgccgatatctcgaccaagtatacacctcgtcatcacaactacacggtcatgctagaagaacaagtccagcaatttctcacctacgcccaacccacactcagcaaaatcgtcgatccctcaaaaacactagtcgctttctggattggcataaacgacatcaacgatagtgccaactacgccgtcgactttcccagtttctacgatcaactcatcagcacacttttcgcatcggtccaaagtgtgtatgatatcggataccgcaatttcctcttcatgaatctaccacccttggaccgcacaccaggaaacgtcctcaaagccaccccctcccccaacaccaccatgataaactggtgggactcgtccttgacctctcacatgcacaccttcgccgccaacaatccatccgccaatcccttcacctttgacgtcaataccttcttgaacaatgtcttggatcacccagataaatacaacatcaagaacgtcacgggatattgtgcgagttacaatcagccatatatcaaccaggcgccggagagttatggatgtttgccgttggatgagtatgcgtggttcaataatgggcatatgacttcgcatgtgcacgagattttggccaaggaggttgcgcagtttctgaagaagcagtag

SEQ ID NO: 2234 - DNA, 2220 bp, Aureobasidium pullulans; identical to SEQ ID NO: 1847

SEQ ID NO: 2235 - DNA, 1674 bp, Aureobasidium pullulans; identical to SEQ ID NO: 1848

SEQ ID NO: 2236 - DNA, 4200 bp, Aureobasidium pullulans
atgcgtttctccaagatctccgcactgctttgtgcagtcggagtacttgctgctcccagcacacatgaagctcgcgatcttgctgtcagccctgacggcaagtgtggtggtgcttctggtcagacttgcttgaactcataccttggtgattgttgctcaaaagccggtacatgcggtgagggtgctttcttctgtggtttgggttgccagaaagagttcggcgcttgtattcctacctacaagggcaagcttgtcagccaaaacggtctatgtggtcacgatgtgacttgcaaaggctcaaagtttggtgactgttgcggttcagacaactggtgtggaagctccagcgattcttgcggtactggctgccaggaagagaatggatcttgcggcttcacatggccttggggctccaagaaatctttggtttctagagctgatcccaaccccacctgccccaagtcaaacaacactatctacacgtcagaaactggcaaccaatacaacatcacctgcagtctagatcactctggcggcgatctgaaaatggtctgggtttcctcgaacaagattgctgactgtcttgccgagtgtgatgctactgagggctgcaaggctattgccatgtcaggtaccgcctgttacatgaagagcaagatcggcactcccgtcaagagctctaatgtcagaggtgctgtttgggtgggcaaggtcgatagctctgcttcttccagtgtctcttctaccgcatccgccacatctggaacatcttcttctgcggtcgtctcatcttccacgtccctgatcagctcttcgaccgtttcatactcgaattcatcctcgacaggttcttcatcttcggctttccctacttcgaccagccctacttgccccgccgccaacaacaccgtcttcatcgctgagagtggtgccactttcctcatcgaatgttacgtcgactactctggtggcgatctgaagtcggtcaacattggcagtaacaggatcgctgactgtgtcaacgcttgtgatgctactgacggatgtattgatatcagcatgtctggtactgcttgttatatgaagaagaaactcggtaagcctacaaccaacaagggtgttcgaggtgcacgcaagatcaaggacgcacccaccagctcgagcagcagcagtgttgccccttcgaccacatccagcagcgtcatgagcacctccagcagcttttctccatcgacttcgagcagcgcttcaagcacctcaagcgatgccgtctctacttcgtccaaggtctcttcttcagtgattttgaccactggagtatctactgccaacgccacctcttcgcacaccttgacaaacagtactgtcagtattcctgctacctccagctcttcggtcatctcctcttcggccgtcgtatccttcaacagcactagcagcaaggtttctagctcctctttctctagcagcagcatttcaagcagctctgtcgtagttggtcccactgcccccatcggcaccggagcttcaagcggtgtcccaacaagcctcaccagcggagcaccttatggaaatggcaccagcagcactgtttcagctggtcccaccgttcctatcacttccgaagactcatcgagcactgtctctagcactgtagcctctttgaacagtactagcaccgtcggctcatccacatccactatcttggtcaacaacaccagcaccgtagtatccagcaggacatcaattataggccctactatcccgattggcactggaccctcgggtggtgtctcatccagcactactagtggagcaccatatggcaatggcaccaccagcacagtctccgtcggtcccaccgtccctatcggtacagggatctcgttcagctcggccattcttgtcaacagcactagcagtactatcactgtacctattgcggtcggaccttcgagcggtatttcctcgtcaactactagcggtgctccttacagcaacggaacatccagtgttcttcctgtcggacctactggtactggagtttccagctcggtcatcaccagcaagaccgtcattgtcagccctatcggtacgggtgcttcaagcggtgtgtcttcgagcactaccagtggcgcaccttatggcaacggcactacaagcgctctgcctgtgggccctacaggtactggtgtttcatcaatcatcactagcagcagcaccagttctgcttcgaactcgtcaatctctctgactaccagctacaacctcacttcgagcattgcatcgaccgtcttgaccatgtcggccaactctactgtcagcgcacctctgacaacagctcccatcgtcactggtccttcgactgccatttcaacctcgtctggaagatataccaacacaactagctccgctctgacaacaagctctgcctcgaccacatatgatttcaacaactggggaggtatcaaatccgaccatcctgttgctacaaacacgactgcctgctccagaaagccaacctctaccgccacctgcgttcgttgcgaaggtcagcctggaaccgacaagtactgcggtcttaccatcaacgatgattcgtatgctgttgttcccaagacttgcaaccaggttgagtacagtctcgatttgactgagtgtaccgttgctcccgatggtgtcagccgtaaggctctctgtatcaacggacaattccctggtcctcttctcgaggcaagctggggtgatgaggtcatcgtccatgtcacaaactccatgactcgcaatggaacatccatccactggcacggcatcagacagaaccacacaaacgagatggatggtgtcgttggtgttactcaatgcgctttggctcccggacagacaatgacctacaagtggattgctgagagctatggattttcctggtaccacagtcacttgactctccaagcgtacgaaggtctcttcggtcccatgtacattgatggtcccaaatccgccgactttgatgtggatgctggtcacctcatcatcaacgattggtctcacatccctgtcgacgacatgtacaacgatgctcaagtcgctggtgttcgtaccatggacagcggtttgatcaacggtatgaacatcaatcctttggcaaagggtgacatcaccggcgctcgctatactgttcccactgaattcgttcctggcaagaagtatctcttccagcttctgaacagtgccatccaatctacctacaagttctacattgatggacacaaatttaccgttattgctgccgactttgttcctatcgagccttatgagaccacagtcttaaccatcaacatcggacagcgctatgagataatcgtcgaggccgatcaggaagtaggtgattacttcttgcgcttcgacaaccagaatgcttgtgcttccaccatcaactccgacgacatcagaggtatcatccactacgcaggcggccctggcggcactcccaactcgactgcctacacctaccctcgcaaggacaatggagtcggtggtatcctcggtacttgtgaagatgaaccccttgacaagcttgtacccatcgtcaagaagaccgtcagctctcctcaccaaaccgtccaacacgatgtcgctgtttcgaactcgaatgaaatcaacctttaccgctggtaccttgacggaaccacgttccaagccaactgggatgatgctactctttacaacattgttaacaatgatactatccccacctactctggcgatcttgccattgaggcctccctgggcgagtgggtatatatgatcatcgaatctcctattcctcttgggcacccaattcatttgcacggtcacgacttctttgtcctcgctgctggctacggaaactacggctctggcacagccttgaatctcgacaaccctccccgccgagatgtggcctttatgcctggagatggacccaccggacaaggcggccaccttgttatcgccttctttactgataatcctggcgtatggcttgctcactgccacataggatggcatgtcgccatgggctttgctttacaatttatcgtaggcaaggaacagatcaaagatacggtcagcgacacctgcctgctcaacgacgtctgcacaacatggcgtccttgggctcaagagaagggtatctacgttgacgactctggtgtctga

SEQ ID NO: 2237 - DNA, 1209 bp, Aureobasidium pullulans; identical to SEQ ID NO: 1850

SEQ ID NO: 2238 - DNA, 1686 bp, Aureobasidium pullulans; identical to SEQ ID NO: 1851

SEQ ID NO: 2239 - DNA, 1110 bp, Aureobasidium pullulans
atgttcctcaacactcgctccctctttgtgtggtgccttgctgctttgctggaagcagaggctgcttcagtctcctccaagccaaagtcaattgtcctttcggagtcagcacccagcaatgctggcattcccttggactcgtttgtgtcatactcctttgagctttcttcttggcccgactttgctggcaacctttcgtatccgaacaagttctcatacaacctcttgaacaatatcggtaatctacaaggctctttgccgattgctcgtgtaggtggcaacacacaagatattgccatcttcgatgcatcccagaagactggtcttcttggtatagttcgtccaaatatctccagcgattatccgaccatcatcacaatcggcccttccttctttgagtcctacaagaccatgcccaaaggaacaaaatacagccatggcttcaacttgggcgcgaattcctccgccgctagaacagctactttcgcttctgccgcctatgcctgcaaagcaatcggcagtgacttggcttactgggaatacggcaacgaacctgaccttttcgtctcctccggctaccgcccgcacaactacaccgaagccgagtacgtggaagaatggctcaatggcaccacggcaatttcctccgccgtcaaagcagcatgcccttccctcgccaacacaaaattcatggcccctagtttcgcaggcgtgggtcccgcaaatgacttcttcaccttggatccggtattagcttggaagaacggattggaccaaaacgacaatatcggcttgatctcttcgcataattatatgggtgtttctaccagtccggggattactttgcaggggacgttgatgaatcataccaatgttgttgctaaagctggagaccaactcagggagtgggcggctatcaaggctctgggcaatggtttggatcctgatgtgccgtttatccttggtgaacacaattcgctggcgagacagggacgtcccggactttccaacagttttggcgctgcgttgtggggtgttgattggaatgtctatctcgcatctcagaacatcagtcgttcgcatatgcatcaaggaaccaattatcggtaa

SEQ ID NO: 2240 - DNA, 1020 bp, Aureobasidium pullulans; identical to SEQ ID NO: 1853

SEQ ID NO: 2241 - DNA, 1737 bp, Aureobasidium pullulans; identical to SEQ ID NO: 1854

SEQ ID NO: 2242 - DNA, 2343 bp, Aureobasidium pullulans
atgatccatccgatattcttgctggtgatattactgcctgccgttgcgcagtgcagcagactcgataaaagacagactccagtggaaaatgaagctctaggaacaccaaaccttgtctacaatggaagcttcaccgacggaactcccggatggaccgtcgaaccccctggattcatccgcgaaggaatgctctgtgtcgtggtacctgccggcactgctccgaaggcgagctatatcgagacgacgcagaactttacccaagtcaaaaatgatatccactacttgaactttactgcctcagcatctcatgccaccaatctatggattcagaccaatggctatgatccatctgcaggtggtgctcctgtcgatcccaatctgaacaccacacaagtgcccttgacaacatccctacaaccattctcgttccctttctcacctgctaaccaggagaacaactctacactcacattctttctcggaggaagcaacttcacaaacgagatctgtctcggcgatataagtctgcatcgcatcaaccgcctgccataccaccaagatgtaggacccgcgatcaaggtcaatcagcatggctatctgccaaacggtccgaaaattgccactgtcatgtcgcagagcaactcatctctgtcctggaatctgctgaacagccatggtattctggtcatgtccggtcagacgcatcctttcggaaacgatacagggtcgggcagaatcgtccacacaatcgactttacaaaccacatcaagcaaggctctggatatactttggaagtagctggagaagtcagctaccccttcgctataacttcgacattgtatacgtcactccgccaggactcaatggagttcttttaccagcaacgaagtggtattgcgatcgatgctgaactcgtgggataccaatatgctcgtccagctggtcatatcaatgtattcccgaaccagggtgatgtcgtgacaccttgtcaatatgaatgggagtcaaatgtcacctacctcgagccatggacatgcaattacactttggatgtcagtcaagggtggtacgatgctggcgatcagggaaagtatgtcgtcaacggaggtatatctactgcccagatattgatggcctacgagcgatcattacacaccccgaacgactcatcaaactcacttggcgatggatctttgagaatcccagaaagatcaaatggctatcccgacttccttgatgaagcacgctgggagatagagttcatgctcaagatgcaagttccgcagaactctccaccgcagctctttaacggtacatatattgacatgtcaggtatggcccatcacaagatgcacgacaatcaatggacacaacttccgacacctccacatgctgattctaagcggagggagcttcaccgcccctctacagccgcaacactgaacatggtagctacagcagctatgagtgcaagactttgggccgaattcgactctgactttgctcagagatgtcttgatgccgctcgcattggttacgcagctgcaaaagccaatcctgcaatatatgccccaggtacagattgggaccttggtggcggtgcctacagcgatgacgatgtgagagacgagttctactgggcagctgcagaactgtacatcacgacttcggaggccgagttcgaaaatgatgtcacgtcgaactactatcacacggccaatgtgtcaactctgtttccccaaggtggatttggatggtcatccatgcaaacacttgcacagctagatctcgctgctgtccccaacaatgtcactggaaaggatgctattatccagtctgtaatggctggtgctgaacagtatatggcagttcaaacaacacagcctactggagtctttattacatcttacccgtggggcagcaacagcaatcaactcaattgcatccaagtagtcgcaactgcatacgacatctctcgcaacaccacctaccgcacctcagccttgttaggcatggactacatcttcggtcgcaatgctctctcgcaatcctacattcacgactacggtaccaagacttcaagcaacatgcattctcgtctcttcgccaatgagctttctcgcctgatccctcagaacccaattgtgcctccgcctcccaaaggagcaatggccggtggggcaaatgagagtccagatgatccacctgccaatgatgttttgaagaattgtgtaggacagttctgttacgtggatgatgtgaatagttatagcaccaacgaggtggctatcaactggggaagtgcgttggcttgggttgctagctgggctgctgaccagtaa

SEQ ID NO: 2243 - DNA, 1752 bp, Aureobasidium pullulans
atgagtcacctcgctcgcgcagcagttgctgccgccgccgccgtcaatgcctcatctttggccgatgtatgcactgcctcgaatatccaggctgctctacccgccaacggtacccttctcggcatcgatctgatcccctcggctgtcaccgcaagcgccgtctacaatgcatctaccagcatgggtggtatgggctctagtggtggagccacctacagctactgtaatgtcaccatcacctatacccatactggcaagaatgatgaggttgtcgtcaagtacgctttcccgcagccttctgactttaagaagcgcttctatgtcgctggtggaggtggcttctccctctccagcaccgcgactggaggtctcgagtatggcgccgttggtgctgctacttccgctggctacgatgccttcgactacagctacgacgaggtcgttcttgcaggcaacggatccatcaactgggatgcaacctacatgttctcttaccaggctctcggtgagatgaccaaggttggcaagtacatcaccgaaggcttctacggcatgaacaacaccaaggtctacacctactacgagggatgctctgatggtgggcgagagggtatgagccaggtccagcgctttggagacgagtacgatggagcaatcaccggcgctcccgccttccgtttcgcccagcagcaggtgcaccacgtctatcccgcaaccgtcgaacacaccatggactactatcctcctccctgtgctctggccaagatcgtcaacgctaccattgctgcatgcgatcccctcgacggcaggactgatggtgtcatttctcgtaccgatctgtgcaagctgcacttcaacttgagctccatcatcggcgaatcctactactgtgctgccgagactagctcttctctgggctttggcttcagcaaacgccaggctggtagccagacaagcactacaccagctcagaacggcaccgtcactgctcaagatgtcgccgtggcccaagctgtatacgatggtcttcacaactccaagggcgagcgtgcctacctctcttggcagattggctctgagctgtccgatgctgatccgacctacaactcgaataccagctcgtgggggcttaatatcccttctactggcggcgagtacgtgaccaagtttgtccagcttcttgatcttgacaacctctccgaccttgatggtgtcacctatgatactcttgtcgactggatgaccatcggcatggttcgctacctggacagtctgcagaccacccttcccgacctcaccaccttcagagggtctggcggcaagctcctccactaccatggtgaatcagaccccagtattcctgctgcctcttctgtccactattggcagtccgtccgctccatcatgtatggccacctctctcaggaagatgctcaaaaggagcttcaagactggtaccagttctacctcatccccggcgccgcccactgtggtaccaacagtctccaacccggcccttaccccgagaacaacatgaacattatgatcgactgggtcgagaacggtaacaagccttcgcgcttgaacgctaccgtgtcctcgggcgactacgagggcgagactcagatgctttgtcaatggcccactcgccctgtctggcacggtaacagcacttttgactgccttaacgacaaggcttctatcgacagctggacttacaccttccctgcctttaaggttcctgtttactag

SEQ ID NO: 2244 - DNA, 2784 bp, Aureobasidium pullulans; identical to SEQ ID NO: 1857

SEQ ID NO: 2245 - DNA, 1440 bp, Aureobasidium pullulans; identical to SEQ ID NO: 1858

SEQ ID NO: 2246 - DNA, 1575 bp, Aureobasidium pullulans; identical to SEQ ID NO: 1859

SEQ ID NO: 2247 - DNA, 1041 bp, Aureobasidium pullulans
atgatccagaaccttgcttctttgctgctcgtgagcagtctcgccttggtggacgcattttcattgccagaagcagcctcctcattctcttccttgcttgcgtcctctttgaacaacgctattcccaacacgcttctcatccgtaaggacggtggctctggcggatgtccagctatctggaccagcatatcatctgatctcacctcatctttcttgggatcggatggacaatgcaccgatctcgcacgagctgctattcgattcgctttccacgatgctggcccatattcttcgaaaacggtgttctacgctcctgctgcaggtggtgctgatggttcacttcttctcaactcagacgagatcaacagacctgagaacggaggtctcgccgactaccgaacatggctgatgggaaagtacactcagtacaaccagaaagccaaggtcggcgcagcagacttgatccaattcgccggctctcacgccgtcatcacatgtcccggtggtcccaagatcaagacagtggttggcagaacagacacctccatcattgcacctgacggcttccttcctgctggcttcggacccaactcctctcacgatatcttgttccagctctttgccgataaaggcttcagcgctagagatcttgcagccctcatcggcgcccactccaccagcaaagccttcactcaacaagccaatggtattcccgctggcgggcaacaagactcaacccccggcaaatgggatattgactactatgctcaagtcaacagcccacctactggcacctaccgcttccaatctgacatcaacctgtcccaagcgaacaccactgttggtaaacaattccagggctttgtcggcaaccagggtaaatggaccagctcgtttgctgacgccatgttccgcttgagtgttttgggtattccgtcgtcgtcgcagagcgggtttgttgattgcacgaatgcgttgcccaggggtacctcttcgaagagagatatccgcgctgctcctatcaatgatcgcgcgcggtga

SEQ ID NO: 2248 - DNA, 1140 bp, Aureobasidium pullulans
atgcgtctctctctggtggcacctctctttgcttttgttgcgctgaatctcaatgcacatgttcaagcatggccagcaatggcgcaacaggcagccgcactgtctcgtcgcgcgcctcaagaccttattgtcgacaatgacattgtgcggataggtcttggcgatgtcaagaacggcggcaccacacccgtcggcacaagtgtctacaacatcctcatgggaacggaagctggcgattcggatgcggctggatacaagccaccaggcatagttggtaccaaggcatgtaaggctgacacatgctgcgtctggtggtggatagctcaggcgatgactgttgccttcactggacctaccggtcgatgcaatggcttcgctcgtgcagccatacgcttgggctttcacgatgcagggtcatggtcaagctctcttgccgctgctggtcaagactttggtggagctgatggaagcattgtcttatcaggcacagagatcaatagagcagacaataacggcctgcaagccattgccaaccaagctttaatctggtctaagctgttcaatgtcggtgtagccgatatcatccagtttggagctaagcatgccgttgtcacctgtcccttaggtccacgcacccgtgtgttcgttggccgcaaggatagtaagaaggctgctcctgaaggcttgatgccctcggtctccatgagcgcagaccaaatcatcagcctcttcgaggacaagaccattcagcctcacgatcttgctgctctccttggtgcacacagtactagccagcaattcaacgtcgacaagacaaaggctggcttcggtcaagattcgacacccggtgtatgggacgtctcattctacaacgagactctgcagccaggtacaaacagcaaggtcttcaagtttcaaagcgaccttgtcacggcgaacgattcgcgagtaagcgatgaatggcatgctttcatcggagatcagagccattggaatggggattacgcctccgcttatgtcagactgagcatgcttggagtaaacaacatcaacaatctgacggaatgtacacaagtcatgccagctgcgaagaagacgttcgctggagcatcgacaccgggtctctttggcagatcataa

SEQ ID NO: 2249 - DNA, 777 bp, Aureobasidium pullulans
atgaagtcaactacttactctctgaccgccctcgctggcttgctggccctcacgcacgccacgcctcttccggccgtcgtcgtcgccccgaccgatctcgccctcaggcaatgtggaagtcagtggtacaaccccagcagttatgcctgcagagctggagccgatagtaacgccctctgcccggtcgttaacggcgaacccatggaagagtgtgccggcgcctgctacacaccttaccgctacaactgcaacggaacagacctctcggagaagccaagaaaggccagcggaaccttcaccctcaccgccagcaaccctgaccaggacttcagcggccagcctatccaagcctctgacaaccacttctgggtcggaggacacgctgccacctactgcccatcgaacgtcggaagcatctgctcctccttccccaatgacatgaccctcatcggcaacggatacatggccaccgtggtcccgggcggacaaagcatctattggcagaaagacggcgctctggccttcacccaagcacactcgtcgtcccagtggaacctcagctactacggtggtggcatcgcttacgagggcggcggttacttcggacccaacggcgaggacctggtcacttgccctgtcattcccccaggcagcaacacgacagcctggcaactcttcgcacgtctggctggcgtcagcttctccagctcgtgtgtcggtgtgtacgctctcgtccacgaccagaacatcacagccggtgcttggcagtacacctag

SEQ ID NO: 2250 - DNA, 1416 bp, Aureobasidium pullulans
atgcatcatacattcgctcttctcctggtggctatcctggccacggttgcgctggccgcaccgactgccaaacaggccactgcacaaacactctctaagcgctccttcaccatccctcgaattcgaaagactggctatgtccgtaagccctcagaggctatgggtcgtgcctaccgcaagttcggctggtcaagaaccactcctgacggatctccttggattgccgtttccaagactcccacgaccacaagctatgacgcagatacctcctcttccgataccacttctgatgtcagcgatgaatcttacactgctcccaagactcacgcctctgctaaggtcaagactttccttgccgcaactctctcctggggtgtctcggctcctgctacgtcttccgccgctcctgctgctgaggaggaggacgacgagactggagaggttatcgctacgcctgctgacaacggcgccgagtacctttctcctgtcactgttggtggacaacagcttaacttgaactttgataccggctcctcagatctttgggtcttcagtacttcccttaccagcgctcagatcggagagcacagtgcctacaattcgtcaaaaagctcaacttaccaagaactcgatggttacaccttcagcttatcctacggtgatggcagtggtgccgcaggtatcgttggtactgatactgtcgacatcggtggtgcaactgtgactcgtcaagctattgaattggccacttcggtctccagcgctttcgtctcggacgccgactcggacggactagtcggtcttgctttctctacgctcaactcggtgtcacctagaccgcagaagacctttttcgataacatcatgtctgagttggcccaacccgtcttcacagcggctctggacctcgatggaagtggcacctacgaatttggcactatcgatgcgtccaaatttactggcaacttgatgttcactcctgtcaacgccagctctggattctggcaattcgacagcaacagctacagtgttggcggcaagacggtcacgagaagcaatgccacacctgcgattgccgacactggtaccagtcttctcttgcttgaccccgaggttgttcaggcatattatgctcaggttcccagcgctgtatacgacagcaccactggcggctatgtttatgattgttcggaggacctgcctgagtttgcagtggctgtcggagacaactacatggccaacatccctggctcaggcatcacattcgcaccagtcagctcaaagacttgcttcggtggtatccagagtaattcgggcagcgacctgcagatcttcggagatgttttgctcaagcatcactttgttgtgttccacggagagtcggagcttctgggtatggccgccaaggccgagtag

SEQ ID NO: 2251 - DNA, 3054 bp, Aureobasidium pullulans
atgcttggtaaaactctcatcaaggccgctgccctggtggcaagtctggcaatcacgtctgatgctcttgcactcaagaagcagaatctcaatgaccttatcaagccatacaagagagaactcctgcaggatctggtgacttgggatgagcactcactctttgtacgtggtgaaagaatcatgctctactcgggcgaattccatcctttcagattgcctgtccctagcttgtggctagatgtcttccagaagatcaaggcattgggatacaacggcgtctccttctacgttgattgggctcttgttgagggcaagcaaggtgactttagtgccgagggaatctttgcttgggagcctttcttcgaggctgctacaaaggctggcatctatctgatcgctagacccggaccatacatcaatgctgaggtctccggtggtggcttccctggctggttggctcgcaatcctggaattcccagaactcgcgacccccgattcctcaatgcaaccgacaactactctcgccagattggcgagatcattgcaaaggcacagattactgaaggaggccccgttatcctttatcagccagagaacgagtactcccaagctgtttcaagcgatcccgaattccctgaccaagtatacatggcggctgttgaaaaaagattccgagatgcaggcattgttgtaccttctatcctcaatgatgcctatccgcacggatattttgtgccaggtagcggagagggtgcagtggatatctatgggcatgacggataccccttgggcttcgattgtgccaacccaaccacctggcccgacaacgcattgcccacatactatggtgatctgcatgcagagcagagcccttccactccttactcaatccttgaattccagggaggttcattcgacccatggggcggcctaggatttgagcaatgtagcgaactgttgaactctgaattccagcgagtcttctacaagaacgacttttcattcggcatgaccatcttcaacatctacatgacgtatggcggaacgaactggggcaaccaaggacatccaggcggctacacatcctacgactatggagctgtcatcacagaggaacgtctggtatctcgtgagaagtacagcgaagcaaaactcgaagccaatttcttgcaagcctcgcctgcttatctgactgccattcctcagaacaacactcacgctaatggatcttactccaacaaccccgaaattgctgtcactgcattgtttggtaacagaaccaatttcttcgtcatcagacacgcagcctacaacagtcttgcctcgactgagttcaagttgacccttcccaccagccagggaaatatcaccatccctcagttgaacggatctcttgtcctgaacggacgcgactcaaagtgggcagtcactgactatgatgctgccggtaccaacttgctttactcatctgccgaaatctttacccagaaggcttatggcgataagcaagttcttgtcgtttactcaggggctaacgagaaccatgagcttgcattcacgctctcttgtagtagcgaagtcatcgaaggatctggtatcaacatcgtcaagaaaaagggcaccacaattattggcttcaagagcagctcggaacgccgaattgtcaagattggcgagctctacgtctacattctcgaccgcaacgatgcatacaactactgggtccttgatctaccttccagccccgtttctggcaactacactgatggcactatcgacacttctgctgctattgtcaaggctggttacttgcttcgcaccgtcgaggctagtggtactatcttgtctctcactggtgacctcaatgccacgactgaaattgagattatcggtggcgcacccgcaaaactcaccgagcttaaattcaacggtgagactatcaagttcgcccaggacagctgttccggcgtagtcacagcctctgctacttacagcgagccctcgttctccgttcccgacctatcgactgttgattggaaggttaccaacagtcttccagagatcgtcgcaggatatgatgacagcctttggaccaacgccgacctgacttacagcaacaacactcagcgtaatctcactacacctgtttcgctatatgcacaggattacggttacaacattggcaacctcctctaccgtggtcacttcactgctactggcggtgagaactccatctatctccagactcaaggtggctcagcatttggcatgtctgcttggttgaacggcaccttcttgggatcagctcgcggtatcgacgccgcttcaaacgccaactctacattcagcttgcccaatgtcgcttctggtagctcttacgttctgactgtcctcatcgaccacatgggtcttcaagagaacggccaaggaggttccagcgaaatgaagacccctcgtggtatcctcaactactctctcaacggccgcaacgcttccgcgatcagctggaagttgactggtaaccttggtggtgaggactaccaagaccgcactagaggacctctcaacgagggaggtctttacgctgagcgccaaggttatcatcttcctggagcaccaacctctagctggagcaacagcactcatggacctatgatcggcatcaccgcccccggtgttgctttctactccaccaccttcgaccttgatatgcctgccggctacgatatccctattgccatttccttctccaacgccacatcgagcaccaatggtgcagcctctgttgcctacagaagtcaaatttacgtcaacggttaccaatttggcaagtatgtctcgaacattggcccccaggatgtattccctgtgcctcagggcatcttcgactacaacggtcctaactacttggctgtttcgctgtgggctcttgacgagggtggtgccaagatctcaaacttgagccttgtcgctggtcctgtcatccagagtggttatggacctattgaattgagccctttgaccggttggtcgaagagagagggagcttactaa

SEQ ID NO: 2252 - DNA, 1059 bp, Aureobasidium pullulans
atgttgcgttcagtccttcttaccgcgacggcgttgctgtccagtgtgacgcatggcgcactcacctacaagggagccgatatcagctccctcatcatgttggaaaatcagggcaagaccttcaagacaaccgctggagccaccgaacctcttgagaccattctcaagcagtctggagccaattcggtgcgtcaaagagtatgggtcaatccctccgacggcaactacaacctcgactacaacgtcaagttgtccaagcgtgtcgccaatgcaggcatgagtgtgtatttggacttccattattccgacacttgggccgatccttcgcaccagaccacacctgccgcttgggacgacagcaccatcggcaacctcaaatacacagtctacaactacactctggcagtgtgcaaccgctacgcagcagaaggcatcaatccagccatcgtgtcaattggcaacgagatcagagctggtctgctgtggcctcttggaggtaccagctcttactacaatatcgctgatctccttcactcggcctcctctgccatcaaggactccaagctctcgacgaagccgaagatcatgatccacctcgacaatggctgggactcgggtactcagctctggtggtacaaaaccatccttgggcagggacctttgaaaacaactgattttgacatgatgggtgtcagctactaccccttctacaacgaccaggccttcctgggtagtttgcaatactcgcttgagcagctcgctgcaacatacagcaaacagctcgttgttgccgagaccaactggccagccaagtgcagcaagcccgcatacaagtttccttcggatgccacctacattcccttctcggcagccggacaggaagagtggattgaagctgttggaaaaatcgttgctggtgtcaagggtggagctggtctttactactgggaacctgctttcttgggtaacggtgctcttggatcaagttgtgaggacaacttgctggttgacagcactggcaaagcgagagtcggactttctgccttcaagaacatttaa

SEQ ID NO: 2253 - DNA, 2712 bp, Aureobasidium pullulans
atgagatactcactcactactgcagctctggccttcgccatctgctctattgctgcccctgtcgcccacggcggtaacgactacggctctctgtccggtacaggagcttcaggcgttgaggtttctccctcgggctcagcaggtgttggagctgatgtcaatggctcaggcgcaggttccgcagggcttgcaggctcagcagatctgggatcatccgcctcgccaagcgtaggcgcttctgcaaacttgggcggctcgggcgttggagcgtcagcaggcttgggaggctccggcggactaggcgcacacgctggtcttggtggcaagggttccggcctcttgggaggtatggctgggttgggacttggccatgaaggtggtctgagttctggtctgtcaggaaagggtggtgcttacggaaatgcttcgccctcaattggagccaacatcggcggcagtggctcagcatcgccgtcaattggagctggtattggaggtattgcttctccttctattggcgccagtattggagccgatagctcagcctcgccttcgatcggagtcggtttgggcggatatgccgccccttcagattcagcatctttgggaggagctctaggcggtctcggatccggacaagcaggcgcaggcttgggcggagctgctggtctcctcggaggcctcggattaggtggcagcggccacggtcacggtgggattggcctaggtggtagcggaagcggaagcggtgatctcttgtcgggattgggaattggtggctctgcaggaattggcagcggcggctcagctggtgcaaatggttcgggagatgtttccggaaatgctggcggtgacacagagaccgatgcttccggaaatggttcttcggctgattctggcgcatcttcttacggcaatgacagctcttcgtctcctagcgagagctctccttctggcactgagaccgacgctgcctctgctactcctacagacgcttcatctgctccaagctacggtgatgacagctcatcccctgaggagagctccccctccggtactgagactgacgccgcttctgctacccccacagatgcttcgtctgctccttctgatgactcttcatctgccccttctgccaactcttcgtctgctcctagctacggatcggacagctcgtcctccagctacggctcggatagctcatctcctagcgagagctctccctcggagaccgagacagacgctgcttctgctacccccacagatgcttcgtctgctcctacttacggcgaggacagctccgtggaggatgcagatggctctgcagctgctcccgtgtacggctctactcccagcgaatctgctgtcgacgctgccactcctactgaggctcctaccccccctgagacctctgctcctgctcttcccctgagcactgccgcctctggaagcacttacaagtcctacatcaagaagcgtcaggatctcagttcgcttatgggtggatcttccggtggtttgagtggtctctcgggcctctcaggtggcagtggattgatgtctggaggcagtggtcttggaagcttcccaagcttgggaagtggaagttctggcttgtctggcctttctgggctctcgggcttgtccggaggtggtttgagcggacttggtagtggttcgtccggactttcaggtctcggaagtttgggaggatcaggcactggctcggcttctgccctttcgaccggcactgcttcatcttccagcggctcggggtttgatctttcaagccttggcggcggctcttcaggtttgagcggactctcatccctcggtagcggctctctcaaggagaagcgtcaatttggtggtcttggaagcttcggcggttcatcaggtttgtcgggcctcagcggactgtcagggggatcatctgggctcagcggcttgtcaggaggctcttcggcactcagtggcttgtcaggtggttcgtctggctccggtttcgacctttcatcgctaatgggcggtctaggctcaagcagcaccggcagctctgactcttccgcttcgaccggtacagctaccactgattcatcgtctggctcttctggatttggctcgctcggctcgctcggttctttcactggctctgctggcggtgctgttcctagcaacgatgttaccggcaacactggatgcaagaaggtcaccttcatcttcgctcgcggtaccactgaaatgggcactctcggctccgttgttggccccggtcttgctcaggatctgatcaaggacactggctcttgctccgtgcaaggtgttgattacccagctgatgctgctggcaacgcaaacatgggcgcctccggcggtcccaagatggccgctctcgccaaccaggctcttaagcagtgccccgacaccaagatcatcctcggtggttactctcaaggcgccatggtcgtccacaacgccctcaactctgtcgacggctccaagattgccgccgtcactgctttcggtgacccgatgaacggacagaccttcaagggtgttgatgacagcaaggtcgtccgctactgcggctcttccgatttcgtgtgtgacatgtccggcaagacccaaggcaccggctctcacatctcctacggctccaacttggccgaggccgcttctcgcctggcccaaatcgttggcgtcaaggcttaa

SEQ ID NO: 2254 - DNA, 948 bp, Aureobasidium pullulans; identical to SEQ ID NO: 1867

SEQ ID NO: 2255 - DNA, 1227 bp, Aureobasidium pullulans
atgcgtctttccaatctgatagcgtatgcactcgcaccgcttctcgcctctgcaaccatcctgcaaaatggacaagttcgagacatagtctttcctgacacaagcattgcatctgtgaccagcaactccaactggacgtctttctctcccaacgcttcccagatctcatacaaaggtcgttgggacgagaagcatatatcttggtggtcagctcctggtctcaaattcggcttcaccggcgacaaagttgctataagctttggtcaatacacttctcaagccgtgctcattgcatacagattcgctggtcaagactggttgttcacaaacgtcactgcaaactcgacccaccagcttatcgacgcatcgactgtaggcttcaatcttacaactcaatcgcaaaagccgcagacattcgagcttcgtgtcaccaattatgcctatggtgtccagatagctggtgtccatctcagcaaaggtgcaaaactcatcaagattccgaactattccaagaaaatcgagatcatcggcgacagtctatcagcaggtcaatacggaacctatgaaggcatttcgagctacgcctggggtctagccgaaggcctcggaaatgtcgagttcgacatcaccgcatatcctggtatctgtcttgtggaccagaactgctggggaaatgctcatggtcaaacatatcaatggtacagagcttctgatacttcataccgctctgaggtaatctatggcgacaacccaccactttgggactttagacatcatcaacaatctgatattgtggtcatcaacctcggcaccaacgataacaacactcacaacaacgtcacgaacgagaagtatcttagcagctatatcgattttgtcggtcaggtgcatcagaagtacccacgagctcagatcatcctcatcgctctttggaacggatttggtcaggttggaaatacttgggagcaaggtggtgccttcatcgaggagattcaacaggtgtacgctcactaccaacacgccggtttcgtgcattacttcaacactactggtattttgcaacacaacgatattggaccacaatatcatcctacggatgttggacatatcaagttggcgagccatctgatgcaatacatcaagctgaagtttggctgggtattcggagctactgggccggaagtgcaagcagatacgctgtactggaacgatgaaccgggctattga

SEQ ID NO: 2256 - DNA, 2115 bp, Aureobasidium pullulans
atgcagtaccctatcatcacgagtctgctggtggcacctctgctcgcacttgcccagtttcctccaccagtagagtactcgaatatcttgaagtcgccgatcaatgagaatatcactattgcctacaagactccacctgctggcacttgtaccacggcattcagcacccagaagcaattcaccggttacattggcttgccaccatttacgctgcagccgatccagcaaaactactcgatcaacaccttcttctggtttacagaggcacggcagaatccggaaacagcaccgctgaccatctggatcaatggcggccctggaagcagcagcatgatcggcatgtttgcagagaacggaccttgcgaggtcgttctaatggccgatggcacatacggcacacaggcacgcatgtggggttgggacaggagctcgaatgttctgtttatcgatcaaccagctcaggtcggcttatcctacgacactcttaccaatgcttctcttgatcttgtgaaaggcacctatcaaccccctagcccggcaccagagggataccccccttatgcctggctgaatggaactttcagctcgaacaaccccaatttcaccagcaatacgactgacatctcggccagagctgcatggcatttcttgcagagttttctgtctgccttcccacaatacaatcctggtgctcacccaaacagcacaaacgtctcgaccactggtatcaacctctttgctgagagctatggtggcatatacggcccaacgtttgccaactacttcgaggagcaaaacagcaagcgcgagaatgggaccattcccaagaactctaccctcgagatcaagcttacctctctgggcatcgtgaatgggatgatcgatgtgctgatacaggactactactacgccaccatggcttacaacaacaccttcggcattcaggccatctcgcagacagacgagctcaacacgatcgaggcgtacaacagcaaatgtgccagcgcgattttgcaatgtcgccaagttgctggtcaaattgacccggaaggcgaaggtgatgagcaacaggccaactcggcatgtcaagcagcgacttacgcttgtaatagcttgatgatgcctttccagggaagcggtctcaatgtatacgacatccgcgtcaagaatccatcgccagacccacctcaggcttttttggaatatctgaatacagaatcggtgcagaaagccatcggtgctcgagtcaactacacctcttcgaacagagccgttcaggctgcatttatcaacacgggagactcggttcgaggcggtcaggttgaggacatcgcaaatcttcttcgggcaggcgtgcgcgtatcattgatgtatggtgatgccgattacatttgcaactggatgggtggcgaagctgcttctttcgcagtcgcagcagctctttcggacttcccttcgaacggattgtcctcttcatacctctctggctggaaccaggcaggatatgccgacattgtcgtcaacagcagctacgttggaggtgctgtacgacaatttggaaacttctccttcagccgcatctatgatgcaggtcatatggtaccatactaccagccggagactgctttcaccgtattcacacgaatcatcgacggcacggacctcagcacgggagaggcaatcaacctttccaacttcacatcatccggaccgatgaatgcaacgcatgtcaatgccgcaaccttcaagcaaccagcaccgacatgctggatcagggacgtagcagatacctgttcgattgaccagcttaaacacatgctgctggaggatggtatggtcgctgcaggggtttactattcaaattcgaagcaatacaatgctcccagcagtactgtgactgctggaaagcctggaacaccagtggcccgatcatccacgagcttgagttctagcggcagtgggagcagcagcagtaggtcgactgtggctctgactggagtgttcacagcgactgcgacacccagccctactcaaggagcagctactgagcgcgtgacgattgcaaagtggattcagaatctgcttgcacttgttgctgtgatggtggtcatgtga

SEQ ID NO: 2257 - DNA, 978 bp, Aureobasidium pullulans
atgaagcttttcaccatcttgtcgggcgttgtgtcgctggccgccaccgtcctagcttattcgaaccccctttcgtgtagtggtacatgtaccaacgctcacgacccttcccttatcaagcgtacctctgatggtacttacttccgtttctctactggaggtggtattgctatccataccgcttctagcattcaaggaccttgggtctacaagggtcaagtcctccccaacggcgcaaatgtagccaactctggaaagaccgatctttgggctcctgatgtctctctggtcggcagcacctactatctctactacactgccagctcttttggcactcagaactccgtgattggtctcgccacttcttctaccatggatgtcggcagctggtccgacaagggctccaccggtatctcttcggacagcagcaagtcctacaacgctatcgatgccaacctcatcaaggtcggtagccaatacctcatgaacttcggctctttctggcacgatatctaccaagtcgaaatgaagtccacccccaacaccgtctccgcctccgccggccccagctacaacaccatcttccaacccagcggcacccacgccgtcgagggcgcctacatgatcaactacaacggtggctactacatgttcttcagcgagggtatctgctgcggtctcgacaagaaccgtccagccgccggtcaagaatacaagatcaaggtctgcagatccaactctgctaccggtggtttcgtggatcagagtggaaagagctgtaccgacggtggtggtactgttgttctgccttcgcacggaaacatctatgctcctggtggtcagggtgtatacaatgatcctagcttgggttgggttctttactaccattacgttgataccactatcggttacgccgatggtcagaagcgtcttggtgtcaacaagatcaagtgggtcaatggatggcctactgtttaa

SEQ ID NO: 2258 - DNA, 1434 bp, Aureobasidium pullulans; identical to SEQ ID NO: 1871

SEQ ID NO: 2259 - DNA, 684 bp, Aureobasidium pullulans
atgttctccgacatcagcctcaagggtgctctcctcagcgtcttcctcgctgcaggtgccgtcgcaagccccatcgagaagcgtgctgcctgctctcagtacaccatcatttccacccgtggtactggtgaacttcagggtccttctgctggattccgcaccatgaaccagcagactctcgcccaggtctccggcggtaccgtctacaacactgtctaccttgccgatgccagccagaactccgccctcggcactcaggacattgtcaacaaggtccagtcctccctccgcaccaaccccaacatgtgcttcatcctccaaggctactcccaaggcgccgccgccaccgtcaacgccatgcccaagctcaccggcgccaacatggacgccgtcaagggagtcttcctcatcggcgacccagagcaccgttccggtctcgcctgcaatgtcgacgccaacggcggcaccaccaccaagaacgtcaatggtctctccgccgtccttggtggcatccccgctgcttgggtccccaagaccatggatgtttgcgcttacggtgatggtgtttgcgacaccactcacggtttcggaatcaatgctcagcatctctcttacccttactctagcactgttcagagcatgggtaccaagtacatggttgcccagctcaatggctccagctaa

SEQ ID NO: 2260 - DNA, 2670 bp, Aureobasidium pullulans
atgcctaccctatcttcatatatccttgcttcggcgggagcctctctggtgaatgcacagtttggcaacttcggttcgccattccccaacacaacatatcctggattcgagtctgagaacccctacactattgagggttccaagagcttccaatggagccctcccaagtaccccagtccttggggtgagggttctggtgactggaaggagtcttatgtcaaggctcgcgctcttgtctcccaattgaccctcgaagagaaggtcaacctgaccagtggtatcggaacgaaccagggtaactgcgtcggtcagaccggctctgttcctcgtcatggtatcaatgctctctgtctgcaggactctcccgtcggcgtccgtctcaccgatggtaactctgttttccctgccggtgttaacgtcgctgctacctgggaccgtggtcttgcctacgctcgtggacgtgccatgggccaggagcactacggcaagggcgtcgacatgcagctcggtcccgttgctggtcctctcggtagagcaccggctggcggcagaaactgggaaggcttctctcccgacccctacctcactggtcttatgttcgccgagtcgatcaagggtatccagagcgcaggagtcatgaccagcgctaagcacttcatcgcttacgagcaggagcacttccgtcaatctcaggaggccaagaactggggcttcaacgtcactgagagtgtttcggccaacttggatgatgttactctgcacgagctgtacctgtggcccttcgccgatggtatcagagctggtgctacatctatcatgtgttcttacaaccaggtcaacggatctcaggcttgccagaacagttacattcttaaccacgtcctgaagaatgagctcggattccagggcttcgtggtttcagactggtacggaactcacagcggtgtttctgctattcttgctggtctcgacatgagtatgcctggtgatcccgttcaggagttcggaaaccacggtggtgctctttttagctcgaacatgacaattgctgtcattaacggaactgttccccaatggagactggacgatgctgccgtccgtatcctggctgcctactactatgtcggccgtgacaagaacgaagttcccgtctctttcaactcttactctctcgacacctacggttactcccacaatgctgttggtcaaggttacggccttattaaccagcacgtcgatgtccgcgagaaccacagcaagctcatccgtgagattggctctgcttctaccgtcctgctcaagaatgtcaacaacgctcttcctcttactggcaaggagaagttcaccgccgtgcttggcgaggatgctttcgagaacgtcaacggacctaacggcttcactgatcgcgccggtgactctggtactcttggcatggcctggggctctggatctgccaacttcccttacctcatcactcccgatactgccatccagaacgaggttattggtaagaacggtggccagtaccagtctctcagcaacaactcgaacctcgaccaggccttctctcttgctaagcaggcagaggtcgcgataatctttaataatgctgactcgggagaaggatacctccaagttgagcacaacttcggtgaccgtaacaaccttactttctggcagggtggtgacgagcttgtcgccaacgtctcggctgcctgcaacaacaccattctggtcatccactctgttggccccgttctgcttgaggagtacgccaacaaccccaacatcaccgccatcctctgggctggtgttcctggcgagcagtctggtaactcgattgccgacattctttacggtcgtgtcaaccctggtgccaagcttcccttcaccatgggtgccaagcgttccgactacggtaccgatgttctttacactcccaacaacaagattcctcagaccgacttcaaggagggtatcttcattgactacagagccttcgacaagcaggagattgagcccgtctacgagttcggtttcggtctctcatacaccaacttcacctacagcgacatcaaggtcaacaagctgaacactagtgcctacacccccactaccggtatgactcctgctgctcagacctacggaaacatcagcatgaaccctgccgaccacctcttccccggcaacttctctcgcgttcctctctacctctacccctggttgaactcgaccaacctctcctccgctgctggtcagtctcagtacgctccctacggtgatgacagcttcgtccccgagggtgccgtcgactcttctcctcagcctcgccttcctgcttctggtccttccggtggtaaccccgctctgtgggacgttatctaccgcgtcaccacccagatcaagaacgtcggcaaggtcgctggtgttgaggtccctcaactctatgtctctcttggtggcccttacgacgctgtcaagatgctcagaggtttcgagagattgagcatccagcccaaccagaccgtcaccttctctgccgacatcatgagaagagacatcatgaactggagccccgaggctcaggattggttcgtcagcaactacaccaagactgtgtatgttggtagcagttcgagaaaccttcctctcactgctcagctcgcttaa

SEQ ID NO: 2261 - DNA, 2250 bp, Aureobasidium pullulans
atggtatcaaggtcctcgttgactgccatggctcgcccggctcccagaacggtttcgacgaactctggccgctctggcaatgtagcttggcaacaggacgacaacatggaacaaagcatcagcatcctcgagacgattgccaagaaatacggtgctcaggagtacgctgatgtcgtctttggtattcagctcgtcaacgaacccatttcgtgggaccagaacaacattgacaccaccaaggaatgggccaagaaggcctacaccgctgtcaagtctgcttcgaccaaccaagacctcgctgtcattatgcacgatggtttcatgggaccctcggactgggaagaggttggtgctgctgtcaacggtggtgcctctctttctgacgccaagttttggatcgacacccatctctaccagaaccaggttgcagatgactccaagttgacccaggacgaacatgtcgagaaggcctgcaactggtcatcaaccgagcttttgccatcatcgtctaacctaccggtcatcgtcggcgagttcagcgctgctaccaacatctgcgcgaaccctgacggatccactgttgccggcagcgtctgctggatcgacggctgccaatgctctgccaatgtcgacattgaggactggaacgagcctctgatccaagctacccgcaagttcctcgaagctgagctcgatacctttgaagcacacgctcgcggatactttatgtggaacttcaagggacctggtgcctggggctaccagaatgccatcaagtatggcttgattggagacaagatcacagacagaaacctggaaacacatctttccatcatacacaatgtctgccgatactatcacaacccccccacaactggagagtcaaagagcgctcgcaagaagcgcgagaaggccgaagccgccgccgctgctcaagctgccagccaaccccagcaggacagcgatggccagaagacccccgaaatcacagagaccaatggcgactcgtttgagagctctcacatgaaggaactgcagaagaacctccgcaatgtgaacaagaagctcaactccatgaccaagttggactcgatcctcgccgagaaccccgacaagtccttggacgaactcctcgcttcccgcaagatcaacgccgaccagaaggcccaggcctcgaagaagcccgctctccaagcccaggctgcccagctcgaagaacagattgcccagtacaagaaggttgatgccgactaccagtcgcgcatgtctgcccagcactcacaccttacttcgactcaccaatccgagattgagaagctgaaggcttccgtcaaggaggaacacgaggctgcgctcaaggccgtcctgcgcgagaagctcctcacattcagccagttcctcagagctgctgctgccaagcgtgtcatcgaagaagaggccgacacagacgagtctaaggcattcgaaggtgctctgttgctggtctacggaggtgacgacaaggctgttgatgctgccttgagcttgatcgagggctctgacgagcaagtcccttcggttgagggtgaactgttgcctatcaagtattcgcaagtcaagcaggccgctgttggctttggcgcattccccggcgaggagaccgcccaagaggaggcccctgttgagtcaacagacgctaccaacgtccagcccgaagacactatcccttcgagcgaccccaccattgcacacgctggcctcaccgagttgggcattaaccagtccgctgaggaggagaagcctatcgtaattgccgacgccgagcctcagtctatcgccgaggcctccaccggcgacgagtcggccaacaagtccgccgagacacagtgggacaacgccgctgccacagccggcgccgaccaggagctggacgactcctacgagatggtcccccgccccgccgacgagaccgaagctgtccatgaacccgcccagcctcagtcgaccagctcttgggccgatcagacatccgcaaacgccactgctactgaggccgctgccgagaacaacaacgctaccaacggactcgcatcgaccgacgctgagggctttcagtctgttgagaaacgcggaggaagaggtggccaacagggacgtggaggccgtggacgcggtcgcggtggacaaggccgtggcggtcagcaacgcggcagcttcagaggtaggggacaagctcgtggtcgtggccaagctcctcagcctcaagcatag

SEQ ID NO: 2262 - DNA, 2082 bp, Aureobasidium pullulans
atggcccctgcctcctgcgtcttctttggcctcttctgcgactcaactagcggaactactacatcggtctctaccacatcatcttcaatcatttcttccaccacttcaacaatactctcatcatcaacatcaaaggttgtggtagcctcgtccacttcttccgcagcaccagtctctactctgaagacatcaaatgctggcgtctactcaaactgctactacaacatcgatggagtaggggagttcaacacgagatgggtcgcagattggacgactggcgccacacaggatctgacaggcattgtctcttcagcttataccgtgggaactcctagcacctcatctactacaaccagcagcaagatcaagagaggtttgggcagtctcttctccttgttttccaactctctttcatttagaatcgtgccttcatcaacaaaggcagtgacttcgacagtcagcagtgctgttggatctactgttggcacagtggggtccgtcgtctctggtgtaacaactggagctacggcagcagtcgcatcggtagaggcatccttgagctcgagcacccaactctacactcaatacaacgacatcctgtatggaagtgtcagagctgttatcctgctgagtaatgccactggcttcacatcattcagaagtgataccatggagattgaccttaactggttgaattaccactctacctacgataccactgccgtctctgatgcatctacagcatggcacgagtaccgtgttgactggctacctggagctaccaactactatatcgactccaagctcatgagtagcacaaccagcgagacaagtcctggtctatggctgtggaatgcttggtctgatggcgatgacgactctgtcttccagatgcgcagtattgatgcttacttcaaccgcacatctgtcgctacagatcttgctaatggcgttgctgtctgcaaagaggtcaacattgccacggctgctgcgtcatcggtggttgatactgccaccagcctagttgggactgtcgcaggagcagcaactggggttgttggaggtgtagttggtggcctcgtaggtggttcatcctcaacctcgagttcgtcgatcacccctactcctactcctgcgcccaccactcttagcacttcgaccaaggccccttcgctctctgcacaagccaccgtctctttcacgactattagctcagcttggactggcaaaactacctcgacgacaactcaagtcaacggtctctccgccaccgtcattgtccttacacccggtgtggtagccgcaacgacctcctcttcctccacttccagctcaggcggctacgtctacatgaccactaccacagactcaggtacatttaccgcagtccaaaccaagaccttgctgcccaacattggcacaacagccaccgtccaaatcatctatcccaccccggtcaccacctgcagcaataccggtatcgcctacgccggctacacgaactctttcgcaggcggccaggcaacctacggctaccccaaattcacccccaccgtctataaatctgccaaaccatctcaaaccggcatcacaaactacattgcagaagtcaacagtggaagcacgggcgccaatgtggcatactacggccgcactaccacgacccaaaattgggtcatcgatcatgtgttttatcttttcgcaagacaggatggttattattctttcaacatcccttatacggatgatttgcagatggtgtggtatggagataaggctgttagtggatggactagggacaacgcggatattgtgcaattctggagttcgcagattgctgtgcagacgccgcagactattgctgtgtacttgactactggcagttatcttcctctgagagttatgtttgctaatggtggtggtgctggtgaattggatttcaacatctatggaccggatggaagtactattcttgcgtcgaataggggattgggtacgggaagttcgtcgattgatatcgtgcagttcccttgcgatactacccagggcaagaagttccctgcctggggcgctgagacttga

SEQ ID NO: 2263 - DNA, 1413 bp, Aureobasidium pullulans; identical to SEQ ID NO: 1876

SEQ ID NO: 2264 - DNA, 2418 bp, Aureobasidium pullulans
atggcgggattgcgattactcacgctgttggcgtccgtcgctcttttattgtgcttttttccttcttgttcggttcatgctcaatcagacaccgagggtccactccacacaacaaatcatgtaaagcgttacggctcaggggctccttactggatgtcccaaattcccagacaaggcaaagtggtttacggcacaaactcttcatatcctgtatggagaaacgtcaaggactatggtgctaaaggtgatggcgtaaccgacgacactgatgctatcaataatgcgacatttgctgggggcagatgccaatatccttgcgagtcacagacaactgccccagctatcgtgtacttcccccccggtacatatgccatcagccgcccgctggtcatgctttactacacccaattcattggtgatgcaaacagcttgcctgtaattctaggtctacccaacttctacggcatcgcactacttgactccgacccatatctgccatatgggctcagttggtatgccaaccagaacaacatgtggcgtcaggtccgtaatttcgtcttggacatccgacaaatccccaaaggcacggcgcactgtttgcattggcaagtggctcaggggacgtcattgcagaacattgtttttgaaatgaccgagggcggtgacaacaacaagcaaatgggtatcttcatggataacggatcggcactatacctggaagatctcatcttcaatggtggcggtgttggcttcttttccggaaatcagcaattcacttgtcgaaatctaaccttcaacaattgtcagaccgccatctaccaaaactggaactggttgttcgcctacaaagacatcgtcatcaataatgccaaaatcggtatagatatgacccaaggtggggatgtcatcactaccggctcgatcagcttgcaagacgcgaccatgaataatgtcgagattggtgttcttaccaccttctctggcaactcaacccctgcctcggctggaacgcttctcttagataacgtcaacttcgtcaatacacctgtcgctgttcagctttctcccagcaatgctacaattcttgaaggaaaccaaaagatcgcatcctgggctcagggcagagtttatactgcttacgagtcttcctacgaggagaacaacttgacctgctacgggcctgcagccaaattcgatcgagtacaacaacttgttgagccccctccgaaatcaccatctttgctgaccccagatggttcgttctacacgcgttcaagaccacagtacgaaggcgttcccgtcgaaaacttcatatccatcaaaacctatggttgtgctggcgatggtgtcaccgatgatactgcatgcgttcagagcttcttaaactcaattcgaacggaccagatcgcctatattgactacggcgcgtatgtgatcagagacactatcaactttcccattccgattaaggtccagggtgagttatggccttacttcatggtggatggcagcgcgccaaagttcagcgatcagaacaacccccaagttgcatttcgtgtgggacagcctggtcaagtcggtgacattgaacttgttgagattatgttccaaactttgggcgctgcaccaggtgcaattctgatggaatggaaccttgcgcaatcatctccaggatctgccgcaatgttcgatgttcactggcgtgttggtggcacaaatggcacgaaactgcaatcctacaattgtcgcaagacacccaacgtccccacctccccaaaagctgaatgttatggcgccttcctccttcttcatcttacaagatcctcgtctatgtacatggctaacaactggggctgggtcagcgatcacgaaatggatttggccgatcatgaccaaatcaacctctataatggtcgtggagttttggtcgaaagccagggtcccgtgtggatgttgggcacttctttcgagcacagcatgttgtacaattaccagatcgcttcagcgaaggagatttacatcagtgccattcagtcagagactgcgtacatgcaaaacaatcctaatgcgatctcgccataccctccgctgtcaaattggaacgacccaaccttctccgattgtttcactgtcaattgccctaagacctggggcctacgcatctttaatagcacatacatctttgcttacggtgctggaatgtactctttcttcaacaactacgactctggttgtttggctactacgaattgccagcagaagatggtcagcgttgaacaaagccaaggtatctacctatacgcagtcaacacggtgggctcatcgaacctggttacggtcgatcaggtagatctcgtgcctgccatttcgaatgcgaacggctttgcggacacagtggcgattttcgagtatccttga

SEQ ID NO: 2265 - DNA, 1638 bp, Aureobasidium pullulans
atgaaggtgtctgttctttcgactttactcttcgccgctggtgcgattgctggtcgcagtcctcaacatgttaacaagaagttgcctgagcgcatgcgtcgtgaacctgccggcgactttcctgctgtaggtctcgacaagagagctgcttccaagaagaagaagcacatcatcccccagaacagcaacacgacaaagtatgctgttgatggcaccaagattcctgatgtcaatttcgatatcggcgagagctatgctggcctcatgcccatctcctcccaacagaacgctagtgagctatacttctggttctttccctcggcggacacccacgccagcgatgagattgtcatctggctcaatggtggacccggttgcagcagtcttgagggtctgctacaggagaatggcccattcctttggcagtacggaacttacgcgccggtgaaaaacaactacaactggaacaatcttacgaacgtggtttgggtagaacaaccagccggcactggcttcagttcaaagggaagcacgccagccgccaccaacgaagaagaggtagcagagcaattcgctggcttctgggccaacttcatgaacacctttggtctccacaacaagaaggtctacatcactggcgaatcctacgctggcttctacgttccgtacatcgccgacaacttcatccagaagaacaactcgcgtctgtatgatgtccatggcattatgatatacgatccctcaatctcctatgatgtggttctgcaggacattccagccactccatttgttgactactggggccctctgttcaacctgaatcagactttcatggacgatatccacaaccgctccgatgcttgcggctacactgcgttcatggaggaggctcttaccttccctcccaagggtctgttgccctctcctcccaacgccgactacagtatgcctgggtgtgagctctggaacgatatctacaacgctgtcagtctcgtcaacccctgctttgatatctaccaggttgctaccacctgccctctgctctatgatgttctcggcttccccggtagtttcgactacctgcccgaaggcgtccagatttacttcaaccgtaccgatgtgcaaaaggcaatcaacgcgccaattcaagagtgggaagagtgtaccggcggaattctacgccgtgacacaagcgagtacaccagtctcagtgtcttgcccaaggtcatcgaacacaccaacaacgtcatcatcggtcagggaatgctcgactacatcatctcctacaacggaactctgatggccattaacaacatgacctggaacggtgctcaaggattcagcaagggcccttcagcctatgaggaattcttcgtcccttaccactccgagcttaacctgggagatcttgccggctcgggtgttcagggagcctggcacactgagcgtggtctgacttttgccactgtccagctttccggccacatgattcctcagtatgcgcctagcgctgcgtaccgcatggtcgagaagctgcttggaagaaccaagacccttggtgacaagagcaacttcagcactcagaagggaaactttggcaactccttcaacttcatcaccgccaatgtcaccaattag

SEQ ID NO: 2266 - DNA, 1011 bp, Aureobasidium pullulans; identical to SEQ ID NO: 1879

SEQ ID NO: 2267 - DNA, 2151 bp, Aureobasidium pullulans; identical to SEQ ID NO: 1880

SEQ ID NO: 2268 - DNA, 798 bp, Aureobasidium pullulans
atgtactctactttggcaatcctctccggccttttgaccttcatcactttcaccaccactgtgactgcccacggcttcgttcaaggcatcgtcacaaatggaaaatggtaccctggcgctcaaccctggtggcgcgtcaaccctcagatcccccatgccaaatctgccggatggtcatctctcaaccaagatctcggcttcatctctccttctgaatacgggactgccgacattgcttgccacaagagtgctaagagcaccaacacccgtatccccgtaaaggctggcgacaaggtcaagcttctctggtccgagtggcctcaaagccacaaaggtcctgttatcagctatctggccaagtgccctggcgattgctcgattgtcaaccctaccactcttgactggttcaagattgaccaagcaggtctgatcaatggcaaccctgctcctggcacatgggcctctgataccctcatcgcaaacaacaactcctggactgtcacaattccttcttccctgattgcaggctcttacgtcctccgccacgagatcattgccctacactcagccgaccaagccaacggtgctcagaactaccccaactgcatcaacttccagatcagtggaaagggcactgccaagcccgctggtgtcaaagcgaccaagttgtactcggctaccagcaagagcattgccatctccatttactggcctgtattgaagagctacaccattcctggacctgcactgtggaagggagctgtgaagcgttgggtcgagagaatcttcgaggcatag

SEQ ID NO: 2269 - DNA, 984 bp, Aureobasidium pullulans
atggtctgggaatcaagcgtgacactcgtggcagcagcattggctctttccaatctagtgaatggcctaccgaacagtcatcccagtaaaagccactatcctggctgggcaggcattaagcatatctttgcttttggtgattcctatactaccacaggcttcaacgtatctcttgcgcagccaagccctgcaaatccgttcggcaacccgacatatccaggatatacatcttccaacgggccaaactggattgactacttgacgacaacctacaacaagtcattcatcgagaccatcaacttggcatatggcggcgcaaccgtcgattccgccctcgtagcaccatacaaacccaccgtactatcagtcaaagagcaagtacaaaccgaatacctacccatctacgcctcgcagtcctcaatcttcccctggacatcagacgacaccctcttcacaatcttcatcggcataaacgacatcggcaacagctactcctctcaaaacgcaacactcacccctacaatcttttccgaactctccggcctggtcgaccaactctactccaccggcgcccgcaactttctcttcctaaatgtacctccagtcgaccagtctcccctcacccaagccgccggccctgcctctcaagccctcgaagcttctgcgatttccgactggaactctcgcgtcgtctctctgtctaaatccctaactcaccgtcactcggacgtcacttccttcgtcttcgacacgaacaaagtcttctcccgcgtcatcgagcacccttgcgcataccctcagacttgtgcgtatcagaacacgacccaatattgtgaagcttatcagaatggaacacccgaacctacgagtttcaacgctacgtgtggggtttcggtggacaagtatttgtggttgaatagtttgcatccgacgtttagaatgcatgaggctattgcttcgcagattgtcaagttgatcaagtag

SEQ ID NO: 2270 - DNA, 1134 bp, Aureobasidium pullulans
atgaggccccaatcagcccttctagccatcggctttgctgccatagtaagcgggcagactccaggctcagatggacagatcaccgtcgccactgcaacatgcactgctattggtacacagacatacgcagtgaccgatgcccaaggtatcctctatcggtaccaatgtggtgccggaacatttggagctcaatttagtgcggttccatcatcctccgttggtaactggactgcctgcttcgctttctgcgacaacgctcctggttgtagtgggtttacctatgtcaacggagctccgaacggtaatgggcctggtggttgcaatttgaaatccggtactgctcaatcattgaacagcgatggtcttgtatcaactcgaattggtgcaatcatggcccggcatggtcctaagcccgcgccaaccaattcttgcccggcacaaaatctccagactgtcaccgacttcaatggtgtgaactatgtgattgcttgcggaaacgatacgaatggagtcggagttactgcgctgcaagccaactacggcttcaacgaatgctttgacaagtgtgattcctacaccgcctctacttcgccttcagtctgcaacgcctttcagtgggttggaactggtgctaacggtgtaggaggtggtaattgctatctcaaatttgtgtcaactgcttcattcgtcacagcatacaacacgaacaacgttgggggaataagagtcgttgcggctacaccgactattgcctcttcggcctcctcatcgagttcctcttcttcaagctcggtgtcatcgtctcgatcatcttcaagcgctagctctgctgcgagctcttcgtcgtcatcggtttcatcttcttcatcatcgtcactctcttcttcatcttcgtcgagtgcatcgtctgtattggctgtgcccgcctcttctgctgccccgagtacacctacaccgacaccgacactactgggttgcccccaaggagatggttctaccttcacggattcttcaggtactcaatacctgcttcgttgtgacaaaacttttactggatataccgatcagcaatatgaagaaccggatctgtcgacttgccttacactcttgttgcaaaacgtccttatgcagtga

SEQ ID NO: 2271 - DNA, 705 bp, Aureobasidium pullulans; identical to SEQ ID NO: 1884

SEQ ID NO: 2272 - DNA, 1746 bp, Aureobasidium pullulans
atggctccttcgatagcatctctttcggcaattgccctggctggacttcctcttgctttgggtcaatttgtcaaggcaccgacgaattggactcacgctactggttattcggacatccaagtccgctacaaggaggttcctactggcacttgcgagctcaacagctccgtaaagagttactcgggatatctcgatgtcgacactgacgaacattatttcttctggttcttcgaggctcgtaaccagagccccaaggacgctcctctcacagtctggatcaatggaggtccagggtcaagcagcatgattgggctgttccaagaacttggaccttgcagaattgatgaaaacggcacagtcgtcaacaacccttactcatggagtgaatcgagcaacatgatctttatcgatcagcctacacaagtagggttctcgtactccgttcccgtgcccggatacaccgacgcaaattcgggatcaattgtcactctacccaacgcaacttgtcccgagtacgcacaagggtgcggaacgtactcttatccaaatgagacattgactgccaactctactgccggcgtcgcgcctaacttctggaaggggctccagggtttcatgggtgctttcccccaatattcccgccacgaattcaattttgctacagagtcttatgggggtcattacggcccgttgatcaatcagtacatcgaaaaacaaaacgacctcatcgcgaaaaaaaagcttccgaaagctcaccacataaatctcaaaacactacttatcggcaacggctggtacgacccgctgatccagtaccaggcatactacaacttcactgtctaccctggaaacacatatgactacaagcccttcaacgacagcatctcggccatgatgtacaatgcgctttacggccctggtaactgtgtcgacatgaccaaggattgctacgccagcggtatcaacgaggtatgcagcttcgccgacaacttctgcgccaacaatgtcgaggaagttttggacatctacgctctacgtgacgaatacgatattcgtgaactgtcacccgacccgttcccatctactttctacgtcgactacctcaactctcctaccgttcaggaggctatcggtgcctatgtcaacttcagtgagagcaacagtgctgtctcatcggctttcggaagcactggtgacgatgaccgcgagagtggcactattgaggcactgaagtatctcgtgtctgatgatatcaccgttgtgctttacgctggtgatgccgactacaactgtaactggcttggtggagaagtcgtcgccggagaggtcaacgctcccggcttctcaagtgcaggctacacaaacgtcaccagctccgacaacatcgttcacgctcaagtcaagcagtctggcaagttctcattcgtccgcatcttcgaaagcggtcatgaagttcccttctaccagccgttgatgagtcttgagatgttcgatcgtgccatcaacggcaaggacattgccactggtagacgtactgtcaagggcggctacaagaccaccggtccggcaaagagcacctaccgcgagggcaactctactgttcagttcgaggtcgtcaacgcaactgccacatacaacacaacctcaaacgagcccgacccaatttcggccaagaagagcttcaaggctgctaacaagagacgcttgttcaagcctgccaagagaattgttgatctgacctcctaa

SEQ ID NO: 2273 - DNA, 1884 bp, Aureobasidium pullulans; identical to SEQ ID NO: 1886

SEQ ID NO: 2274 - DNA, 1818 bp, Aureobasidium pullulans
atgcgtgccgttgctgctttcgcggcatgcgttgcctttgccaatgcgcaaacatttgacatggacatgatcctggctgcagagcctgtgcctacgccctcgatccctgttgtctacattactggtgatgctccttctacaacagcatctgccacaacagtttcatacgtagagacgcaagcagctgcatctgtgtccctagaagttgctgcagctgcaagcagtactgctctcataaaacgtgccgcctctacttgtgtacctcaacccactggcatctctcacaattcgagtccggatactgcttctgccttcttggccgatgcatactactccagtgttgcctctgccgcaccgactcctgctggctatgtcaacactttcaccaacctccaggcttctaacaacgcttatggatacatgggttatcagctcctgagtacttacgacacccagctgtgttcgcagaaatgcgacaagaccaatggatgtctttccttcaacctctactttgagcgtgatccttctgttgaccccaacgattcgagctgctccaacccagcatcagtaacccagatcaaatgcgtcatgtggggcggaccaaccctcaagtcaaatgctctcaatgccggacagtggcgcaacaagttccaggttgtgatcgctggatcaaatggctacgttaacaagacgatcgaccctgctcctggctacgaccagcctatcgatctcggagatgctactatcaatgctcctctggactgctctggccacgacactttcatgcagtccaagtttttcacctccggacctttcgatgctaacttgtgtgctgctgcttgttctgctcagaatgtctacaacctggcccaccctcctgctgagggtaagcccaagacttgccagttcttcaccacctacctcctctataaagacggtgtggctcaaggacaaacgtgttcgttgtatactatggcgtggaactcaacctataacaccaacaaaggttattactacggccaatcgcactacaccgtaggctatagtttcgctttttccaacacaactaattccggagccccctacgctgcttgtagctcttcctcgtcatccacagtcgtctccagcaccgccaaggcctcatcgaccgctgtgtctgcttcgtccactaccttgtccaccgctactgccactcccaccgctcttctccccgatacttcctgtaacaacgccggtctccagttcgcatactaccccggcctcgccagcacccagtgggatttcaactcccccaactacggtctggacgccgagaactataagaccgtaacacccaactacaccggcgtaaccaacttcatcggtggtttcgcatggaacacttaccaccaatcctcttccatctactccagcacccgccccttcgaccacgagaagatgatactcaaccaccgcggttactttttcgcccccacctccggcgactacaccttctccgtccccacttgcgatgatgccgccttcttctggctgggcgatatggcttactctggattcaacgaattcaactatctgcttttggacaaccaggccaatggaactcagagtgctactgtcacgctcacggctggaaaatactatcctatccgtttgatctatggaaatgtcggtggtggacctggaagtttgtatttccagatcacgcagggcaataaggttgctgctgattggtcttcaaccgtgagcccgtactttgtccaaaagtcttgtgatggtaccactgctcctgcttatgctgcttttggtcaggagacttaa

SEQ ID NO: 2275 - DNA, 1107 bp, Aureobasidium pullulans
atgtatgctctgatcaccaagatcggcgccctggctgtggcctctttggctacccaagcggttgccgttccttcaaacagcaagcccgatcctttctcgaatgcttcatggcctctgccccacaacatcagtggtgtttccaaccctggagccaacgaaagctatcagggatggggcggcgttcatctccatgatccatccatcgtcatgggccctgatggccacttctactcattctcaactcatggcttggtcgttattagcagggcttcccagccgaattcgctagatggctattgggagcccattggctcggtgcttgagggctctagcatcatcaacaacactggaaacactgatccatgggcccctgatgtgcacaaggtcggcgatacctactactgctactacgctgtctcgcaattcggcagccagttctccagcattggccttgcgacctcaaagacactcagacctggcagctgggtcgaccacggtgccgtacttacctccaacactaccgccccctcgcctttgaacatcaccaacgccatcgatgcaaacctcttcatcgatcccaagaccaagatcccttacctcacatatggcagtttctggagtgatatttggcaattccaactggccaaggatcttctcagtgtagtgtggacccctgcaccagtgcaattgagtttggatcctgttagccctcaagcagaagagggagcgtacctgagccgtcacgacagctggtactacctctggtacagccacggttcatgctgcggctacaacgtctctgctcttcctgctcctggtcaagaatattccatccgcgtcggccgctcccgctcagccaccggacccttcgtcgaccgcaacggtgttgacctcagaaacggcggcggctacatcatctacggcagccacgattacgtctacggccctggaggccaagccgtgcttacaaactaccacggtcgtgatgtgctttactaccactacgtcaacactatccagaaccctacctatgttgacgaactcaagttgctgggctggaactacatcaattacatccagggctggcctgttctgtcctacgactag

SEQ ID NO: 2276 - DNA, 2037 bp, Aureobasidium pullulans
atggctgcactctgggcattgcaggctctcctgctttcatgtctcttcctcaccaaccccgtccaggcccttctgaacgcaaccgaagatgccaaagcccttgttatcgctaacgaccgcctctatgcctccgtcaacaaatccacaggtataatggacatccttactctcgatggccaaaacctactcggcacgaaagagtataatgaagtcactcctggaggcaatgccgctggtcagaatggtattggtccttatctggattgctattgcgttcctgccggtgcgtatacgcctggcaaatatgcgacgttcaagttgtttgagggcaatgattcgactggtgtgccgtacggaggtgtggtcatgtcggaggtgtatcctttgactggacaagtattggagcagtattggtttctgagggagacggagacggggctacatacattttctcgtctggcttattataacgagacgaagccattcttgaggaatctgcaggagtttagaacattgttcagacccactacgcctctgtggactcacatctctaccaatgagaagatcaatgctcctctaccctcctcggatacgttgaagaactcgaagacggtgcaagatgccacatggtacatcggcaattacaccagtgcaccgtatgtcgagcaattcgccgactacttcaccaagtacactttctcggacgaatggagagaccacaaagtccacggcatgtatggtgatggctctaagagcaaagatggctcgaccttcggcgcatggttggtgatgaacactgtcgacacctacttcggtggcccgactcactctgatctgaccgtagatggtatcgtgtacaactatatctcatcgaaccatcacggagacaatgtccccaacattacgactggttttgatcgcaccttcggaccccaatacttccacttcaacaaaggctctaacacgaccaccttgggcgagctgcgagcagaagctgagcaatttgcttcaccaacctggaacaccgccttctacgactccattgcccatttcgtaccgaactacatcccttcgaccaagagatcaacctggaaaggtcgtatcgatctgccgaagggggctaagcgcccaattgcagtccttgctcagaatggcgtagacttccaagacaacgtcctggacaccaaagcataccagtactggggagacattgacaagaagggcaatatcgagatcccaatggtcaagcctggtacataccgcctaactatctacgcagacggtatcttcggccaatacatccaggacaatgtcgtggttgctgttggtagagtcacaacgaccaaggcgaagtggcgcgaggagtctgctggaaaagagctctggcgtatcggcactcctgaccgcagcagtggggaatatcgccatggagaccaacccgatccaagcaagcctctccatccaccagagtaccgtatttactggggcaactgggatttcccaactgactacccagagggtgtgacattcgaggttggcaagagcgacgaggcgacagacttcaattacgtgcattggagtgtctttggcggttatgcgaactcggtcaggccagagccatactatgagaatgtaaacaactggaccgtcttgttcgatgcgaagaagagtgagctcaaatcgaagaaagatgccactttgaccattcagctcgcaggcgcaaagacagctgccggcaacacggacaactggaatgccacgcaattgtggaacaatgttcccttgtcagtagtgatgaacggacatgaactggaaccttgggacatcccatggaaccagagcagttcgtgtgccactagatctgcagttatctgctatgctctggcgcacaagtatgagttcgatgccaatctgttgaaggagggacagaacaagatgatcttgagtttgccgttcaatgcgaccgactacgagagtgcagtgctgcctagaagtacttacgtccagtatgacagcctgaggctggaggtcaagtag

SEQ ID NO: 2277 - DNA, 1182 bp, Aureobasidium pullulans
atgtctgttcgagctactagattgttcgctagtgttgtctctctgctcgctgcgtcgagtgcagcaactaacatcaccaactcttcctccccttggatcgactggcgtacgttcaaagccaacggtgtgaatcttggtggatggctggaacaagaacaatccatggaccaagcctggtggttcaaacacagcaacgccagcgacgaatggaacttctgcaaaggcctctgtactcaatgtggtcctatcctagaagaaagatatgccactttcatcaccaaggcacatatcgacaagtttgcctctgtgggagtgaatttgctgcgtattcctaccacttatgcagcttggatcgatgtcccttggtcggagctgtattctggcaatcagcagaagtggttgagggagattgtcgagtatgctattgatgagtatggcatgcatgttattattggactgcactcactccctggcggtgtcaatgctctagatatcggcgaagctgtcggtcacgcctcttggttcaacaaccaaacaaacctcgccttatccctcgacgccgtccgcagcgtcctggacttcataatctcctcccccacgccccactccttcaccatcgcccccataaacgaagccatcgacaacccctccggcctaggtcaatccaccgccctcacgaacaatggctcggcatgggtgacccattacatccagcaagtaatccccctggtcgaatccaccaacccgcacatccccataatgctccaggacagctggaaaggcgtatccttctggtcccccttcttcccctcttccaaaaacctcgtcatcgacacccacatctactacaactggaaacaaacctacgcctccaatgtaacttctctggtctgcgcgcaagccgccaccacattcggtgatggcaagttcccggtgttcgtgggtgagtgggccatcgaatcgacatttggaaatgagttgcagaggaggaagggtatttttgaggtcatgaggtatgcgtggaggaacttcaatatttctggttcggctttttggtcgggtagatacgagggtaatgctacggtggatggagaggggttgcatagggattattggggttatgcgaggttgattgatgctggagttgtggaagaggtggacgaaagtgctgtcttttgttag

SEQ ID NO: 2278 - DNA, 1308 bp, Aureobasidium pullulans; identical to SEQ ID NO: 1891

SEQ ID NO: 2279 - DNA, 2790 bp, Aureobasidium pullulans
atgggtttgactcgattggccacattctttgcgctcgctgcagtaagcattgcagatacgtgcaaccccctgaacgcaagatgtcccccaaatgtaggtctttcgaccagtgcttatgaggtcgacttcacgaaacaatcctccataccttccgaatggaccatctccgactgggcaaccgtcaagctcggatctaaaggagccgaatttactgtgtcaatgcgtttcgagtctcctcagttatggaccaacttttacattcactatggaaaggtagaaatagttgctcaagttgctcctggcacaggcatagtttcatcagcagtcttgatgtctgatgatgccgatgagattgattgggagtggagcggcaacaacttccgcgacagtgcaggaaaggggcaaaacaactactatggaaagggaatcgtcggcgactacgacagaggcagcttcttcagtgtcgcgtctccccagactcagttccacacatacactatcgattggacgtctacggctctgacctggtctgttgatggcacaattgtccgaaccctcctcgctgccaacactgacagtggctcccaccaatatcctcaaactcccgccaaatttcaactcggtatatgggctggaggagatccaggcaatgcatggggaaccgtagattgggcaggtggatataccgacttcacgaaggcaccgttcacgatgtacgtcaaaagcgtcaaaatcaccaactacaatcctgcctacgcctacaactggacggatagctctggtagttcgaagagcatcaagatcgtgcagaaacctgtagtctcttcttcaagtataaccacgacgtccccaccgacttcttccagcacttcaatcgtgatttccagcactcagatcacatcgacgacttctatctctgtgccatccaaagcttccactacatgtgctggtgttcctccttccgcgcctactcagaatggtatcgtctcaggctgcacgcaatggtacactgcaaaatcaggagacacatgctccaagattgctgcgaagttcagtatccctatcgaagagtttatggactggaacccagcagttgacgctcctctatgctacaacatgtggctcaactacggatattgtgtctcgacggattgtgctcttgccaacacatcgtcaacagtggtttccaccagctcgaccagtacatccagctcaacatctgtgacaccaagcagtagttcaagctccaccattgttgtgtcatcaacaacgttgccaactactacaataagtccgacatcaaacactagcactcccaagtcgtcgagcatttctgccacttccaccactacaactccggcaagctcgcagacgacaagtggaccatcaacaacaagctcaagcactcaatcttctaccttgccatcgattcctgtggtttcactcagcgcaaccgttccttcgtcttctgccgtgccctcgtcgacaccatcgagcaccttgtgtcccgacacggatggtctaagtctcttgagccagaacaaaaatgcctacaccatcagatgctcttctgatactaacaaaggctcatacacgaacaccagagccgccgactcttacctagactgtatggatgcttgtgatgacgccgcaaattctggttgtaaagcctggacatatgttggtgggactaacggtaacgggggaggcgtgtgttggcttaaaaatacctctggcaacttcttgccagctggaaacaattacatttccggtgttttgtctacaaagggctcttccagcactagtacgactcggacggtgtcaagcacttcttcttcgagttctgcagcaccatctcaaactacatcgactagctctacaagcactacgatctctacagatctcccattagccagcccctcagctgaactttgcccagaggttagttctcagagctttgttgcgtctcaaggcggatctgtctactttatgcgttgttcgtctgatacaaacatcggatcgtactccaactcgagagcttcgacttcttacaaggattgcatggatggttgtgacaaggattcaaagtgtcaagctttcacctatgtcggaggtacgaatggtaaaggtaatggacaatgttggtacaaggacaccaaaggcagtgctgttcctgcaggagcgaactacgtggctggtttccttgccgcccgagctccctcttcaggctcatcggccagcagcatcgcaactggaaatttggcagtctcctcaaagtcaagcacaagttcttccaccacgagctctagtagctctagcacctcgaccgcttccacgtcttgggctacaaactctgcaggctccaactacactgtctaccgctcttcggacacaaactggggcgcctacaccaacgtccaagccaaagactcgttcctcgactgcacaatcgcctgcgacaacgacccgaactgcaaagcctacacctacgtgggaggcaaatccggttccagtccaggcgtctgctggctaaaaagtaaactcggagaaccagtcccagcaaacgacaacgtgatttctggctcaagagtcacgcaaagtgttaagatgcgaagggctgtgtctagttggtggaatagtgttacttcgaagcctacggcgactacgacaaaaagggttgcgactgtgaagcccaaggctccagcgaatcctccgtgggctcgttattatcctcatggtgggaggtggatgtggaatggacatggtgagtatgagtgggcttggaattaa

SEQ ID NO: 2280 - DNA, 1098 bp, Aureobasidium pullulans; identical to SEQ ID NO: 1893

SEQ ID NO: 2281 - DNA, 2106 bp, Aureobasidium pullulans
atggtgtcctctctcctgcaggccatagcttttatgcttggtctgtcccaactcgcttctgctcagagctacaatgagccataccgccctcaattccacttcagtccgaagaaaggatggatgaacgatcctaatggtctgctctactacaatggagtttaccacatgtactaccagtacaaccctggcggtaacacttggggcaatatttcgtggggtcatgcgacgagccgagacctcacaaagtgggaggagcagcctgttgcacttctggccagaggttacggcaaaaatgttaccgagatgttcttctctggctcagcagtcgccgacacacagaataccagtggctttggcaagaagggtaaagtaccctttgtggccatgtacacctcagttcatccatatgtcgagaagttacctagtggcaagaccgtaaggccaaatcagcaatcgcagtcaatcgcttacagtctggacgaaggcatgacttggacaacctatgatgccgtgaacccagtcatacttgagccacctgccgcatacgcagatcaattcattgacttccgcgacccatttgtcttctggcacgaggaaaccaagaaatgggtcgtcatactatccttggctcaattacacaaattgctaatctacacatcacctaacctgaaggactggaccttggccagcgagttcggcccagtgaacgctgcaggtggtctgtgggaatgcccaagtctcttccctcttccgctggatggcaagtcgagtaacacgaagtggattactcagattggtctcaatcctggaggtccgcctggtgtagtcggctctggaacacaatacgttgtgggcagtttcgacggcaaaacctttactgccgatgccgacagtgtatacccccctcctgcggccccgagcggtagcataatcttcgcggactttgagggtactagttttgccgacctgggctggactgctactggagatcttgttggttcgggtccgtctgctggcactgtgaatggtcagcaggacgtgactggttacgttggaagcagtcttgtcaacaccttcttgagcggcgacgccacggtcggcactctcacgtcgaagtcattcacgatttccaaacgatacatcaacttcttgattggaggtggcaacgcacttggtcaggaaggcatcaatctcgtcatcggtaacgagactgtccttcaggctactggtgccaatggtgagaagttggtctggcaaggctgggatgtcagcgcctacaaaggtcaaaatgctgtgctcgagatcgtcgacctcctgaccggtggctggggccacatcaacgtcgatcagatctcattctcagacacaattgctacaccacaaaaggccaactggatggactacggtccagacttctacgccgcagtgccatggaacggacttcctacaaacgagcgaacgaacgttggatggatgaacaactggcagtacgcccaagtcattcccacggagccatggcgtagcgccatgagtgtgccccgcggtcttgcgctccagactgtgaatggcaaagctcagatcgtgcagacagccaaagaaaaatggtccagccttgaaagtcgcggcggcagctactccaacaagtggagttcagtctccgaaggcacgcaaaagctgaagctcgacggaaagactttggacatcgtcttgactttcgatgaccgttctgcagctgctggcaaagcatctcggttcggaatcgttcttcgcgcctccaaggacttgtcgcagcagactcgcgtaggctatgactttacaatcaagcagctctttgttgaccgcacaaagtctggtaactcttctttcgacgccacatttgccagtgtatactacgctcctctgcaggctactcgtggaggcaagatcacaatgcgtatcttgctcgactggtcttcgatcgaggtcttcggtggcgtcggcgagtcaactttgacagctcagatcttcccggcggatagtggaacagatgttctgttgttttcggaggggggcaagacgaaggacgtgagtgtaacggcgaagggggtcggatctgcttggaagtaa

SEQ ID NO: 2282 - DNA, 774 bp, Aureobasidium pullulans
atgcatctaagctcgttcctcccttctttgttggctctcagtggtatggctgctgcattggctattcctgatcctttcctggagactagacaaagcagccctgccgctggtgttgtctacaccaagtgcaccaagcctggcctcttcgctcttgcctttgacgacggtccaggaccatacacccaagaactcatcaacactctcaatgcagcaggagcgaaagccaccttcttcttcactggtactttgtacggctgtatctatgacagagctgcagctgtcaaggccgcttacttgagcggacaccaagtcgcttctcacacctggactcatcctcagactctcgatagcatgagtgttgcccagctcaccactgagatgcagaagctggaaatagcactcgtcaacatcattggtgtcaagcccacctacatgcgtcccccctacctcaagactggtggcaacgttcccaccgccatgagaaaccttggctacagaatgatcaccgacagtgttgactctcaggactggaacggcctctcagtctcacagagcgagcagagattcaagagtgctggaccgaagactcctgacggctttggtcacatttcccttcttcacgagacctacgccaacactgtcagagatttggtcccaagattgatcacttgggccaagcagaacaacttgaagatggtcactgttgctgagtgcctcggagatgcaaatggtgcctacgccaagggaactggtggtggtgctcagaagtgctaa

SEQ ID NO: 2283 - DNA, 987 bp, Aureobasidium pullulans
atggctctatccaaagcatcactctttttagcatggacggctttcctaccatctttatacgcagctcctttattacaaaaacgatctgagtctggtcctcatatcacaaccgatttccctgatccgtccatcctcagagttggaagcacctggtacgcatttgctggacaatctctatacgactacaagagcacacacatccaatttgcaacctcaacagattttgagacgtggacgctacgaccggggaatgacatgttgccagatctgccaagttgggtagactcttccaagaatcatatttgggccccagacatcaatcatttggatgacggcagattcctcttgtatttcagcgcacctacgtatgacaccaatgctcctcattgtattggtcctgcattcagtgactctatcgacggcccatacacgccagataagaccagttttgcatgccctgctgatcaaggaggcgctatcgatgcatctggtttccgagatgcagatggaactcggtacgtcgtatacaagatcgatgccaactcgctcgggcacggcgggacttgcaacaacggagtcgagccgatcgtacccacacctatccttatccaacaagtcgagagcgatggagtgacaaaagttggcgacacatccgaactcatcacgaacgactcacctgaagacggaccacttgttgagggacccagtcttatccattctggcgacacatattacttgttctactcctccaactgcttcgccactacaaactacgatgtcgcgtacgccaccagctcatcgccgacctctggcttcacgaagcaaggaactctgtttgggactggctatggaggactcagaggtcccggtggagcagacgccgcgtttgacaacagccactttgcctttgccgcgcaaaagggcgatggaaggagaggcctatacacggcccaaatcgcactcagtggggacagcgtctccgcatag

SEQ ID NO: 2284 - DNA, 2091 bp, Aureobasidium pullulans
atgtggctctctggtatcgctctagcggccgttgctgcctctgccaatgctttggatcttacggtcgctgccaatggcggtaatgctacttcacccctacagtatggattgatgttcgaggatattaacttctctggtgacggcggcatctatgctgagctcatccgcaacagagctttccagggaaacacagttcacccttccactctactcggttattccgctgtgggaggcacgaatctatctctcaagaatctgtctcagccactctccagtgctcttccgacctctatgaacgttgcagttgctaaggcttccagtggagacgttggattctcaaacactggatactggggcattggagttgaagtccaagactacactggctctttctgggtcaaaggatcttacgatggtagcttcatagcttctctcaagtccgacatcaccaaagaaacactcgccagtgttgaagttccatccaaagcctccgccagcgagtggatccagcacaactttactcttacccctacctctgctgctcagaactccaacaactcgttcaccctcaccttcaagaagtccggtgtcactggtggttcgctggacttcaccttgatcagtcttttccctcccacctacaagaacagacccaatggtcttcgcaaagacattgcagaggcattaaaagagctcaatcctaagttccttaggttcccagggggaaataatcttgaaggtgatgacccaccatacctctggtactggaacgagacaatcggacctcttaaggatagacctggccgacccggtacttggggctaccaaaacacagatggtttaggtcttattgaatacttgcattggtgtcaagatctggagttggagcccattcttgctgtttgggacggcttctacctgagtggacctgtgactcctcagtctgagctcggtgtctggattcagtttgctctcgatgaactcgagttcttgatgggctcgaccagtactaagtatggtgctctcagagcgtctttgggataccctgagcctttccaaattaattatgtcgagatcggcaacgaggacaatcttggtggcggcaatgccagttactctgcttaccgtcttcccatgttcaccgaagctatcaaggcagtctatcctgacatcaccatcatcggatcaacaccgaccgtcgaccccattcctgatcacatctctcttgactaccatgagtactcaagacctgataactttgtcagagagtttggtctcttcgatcattacaacagaagccaccccatcctgatcggtgaatacgccgtcatcgagcctaacaacgccagcatggcttctgttgactggacatcgggcgcgaccagattggctttcccgtcctggactggcagtgttgctgaagcagtcttcctcattggtgccgaacggaactctgacttcatcatcggagcctcatacgctcctactctgcaaaatctgaacagcttccaatgggtgccagatatgatcagcttcacagcagacaccacaaaggatgtcttgtcaaccagctggcacatgctccagcttctcggcaatcacctgattacagagactctgcccaccacgggcggcaactttggacccgcttactatgttgctggttacaacaaccagactggatctcacatgctcaagacagccatttacaatgctacagcagacgtaccagtttcggtctcgttcaagggagtgtccgcaggtgccactgctacattgagtgtcctcacagcacctagcggagacagctacaacaacgttggtactcaggttgtgaagtccacaaacacgaccatcaaggcatcagctggtggtgtcttcaggttcagtctccccaaccttagtgtcagtgtactggaggttcagggcagaccaacctactgggcaggcagctggggtggacatcgtggagcctggggtcacggcgggttcggtggatggacccctagttggggcggttggggtagttggaagggcacaggtcacaacaagagagatatccccaagggttacaaggagattgtctactag

SEQ ID NO: 2285 - DNA, 1026 bp, Aureobasidium pullulans; identical to SEQ ID NO: 1898

SEQ ID NO: 2286 - DNA, 1599 bp, Aureobasidium pullulans
atgaagatcaccatcttctccgccggcctcattggtttggctgctgctctccctcaggcttccatccaggagtcttcgagctcggttgttcagacttctacgacttctgtcagctcgcccgaggatgtccctcatgcaaccagccttgctcaggccgccgcagtcaacgtcaccatttccgtcgaggtcccttctgagatcattgacactacttctcttgagtcgaacagtccggctcttctcaccaccaagcctgtggagagtaacgaattcctgtcccctgccgacttcctgactcaaggtttgtctttggacgacattcctgaggttcccgtcgatacctctgctctctccaagagagacttcttcggactctttggttcttccaacgccagaggtccgttcgtcaacttcctcaaggtcgctgcgcagatcttcgtcaaggttgagaagatcatcatctactggacttgccctcaatggacccgtccaactcccaacaccttccccggatggagaaactacaagtcgaacggtgttaacctcggtggctggctcgttcttgagaagaacattcagcctagcttcttcaacgacaacgcacctagcgccatcgacgaggacagcttctgtaagactttgggccaggtaaagtgcggtgctctgcttgagaaccgttacaacacctacatcaccaccaaggacatcgacaacttcgccgcctacggtgtcaacactctccgcattcccatcggttactgggcctatatgcccgccatcgcaggtgacaactactacactggtggccagaagttggccatgcaaaagattgcccagtacgccatcagcaagcacaacatgcacatcgtcgtcgacctgcacggtcttcctggcggtcagaacggtctcgacaaccagggcaagactggccagctcacttggtggaacaaccagacagccttcgatctttccatcgaaatggtccgcagagccaccgacgacatccttcgccagcccaacagcggcagttacactatctccctcatcaacgagcctctgcctgctctctactacttcggtcagacccaggacagcatcgcctacctgaacaagtactacaaggccgccctcgccgaggtccgcaagagatccaagactctgcctgttgctatctctgatggtttcattggccctcagacctgggacccttactggactaacgttgacccttacatcgttatcgacacccacatctacttcttcgtcggcggatcatactcttacgacgccgcttacggtgcctgctatctcgccaaatcctaccagaacgcttctaaccctacattcattggtgaatggtcaatccaggcgacaaacttcaaccaccttggcgacaacacccgccgcgacttctaccgcagtcagcttcaggcatacacccagtacctctctggtggcatgttctggaacggcaagcacgatggtgatgccatcgtcggtgatgatggttcggcccagaagtactactggtcttgggagattctcgcctctgagggcattgtccctcgtcctggtgacaagctcgagtctctctgttag

SEQ ID NO: 2287 - DNA, 1098 bp, Aureobasidium pullulans
atgcgccaaaccatctcattactggcactctcagtggcagcttccactacagcatcagcaaaatccaccactcacaacgaaaccatttacaaatacacatacgacctcaacaccacataccaaggctggccaaacttcttctccggcttcgactttgaagatgatgcgaatccaccgggatcaggatatgctgcatatgtcaatcaaagctatgcactatcaaataacatgatcagcaatggaaccaacggagcaattcgcataggagtcgatcatacaaccatcatcagcagtaaaagcaaaagtggcagaaaagcagttagactgaatagtaaaatggtctacagctatggtttgttcatagcagatttcacacatatgcctggaggtatctgtggaacatggcctgccttctggatgtccggccccacttggcccataggcggcgaattagacatcctcgagggcgtcaatacaaatccacgcaacaagataaccggctacacaaatgccacaggctcctgcacaaactcccaagtcatcatctcctccaacctcacttccacagattgcacagatctagaagacactggatgtagtatgtcatcctcctctactgcctcgtatggcactggcttcaatacagactcaggcggcgtctacgctacagaatggacccagcagactggtatacgcgtctggttctttcctcgcagctccataccctctgacatcgtttccggaaagccagagcctagtacctggggtattcctgctgctgcaattccggcggaaagttgtgatatgagtacgcatttcttcaacatgcaattggtgttgaataccaacttctgcggtggttgggcgaataggacgtggaagactagtgggtgtaataggtatgcggatacttgtgaggagtttgtgaggagcaaccctgaggcttttgaggatgcttattgggaagtgaactatatcaagagctacactggcagaaatgttattagtgtggttgctgtcaacggtaccacttcttcggcgacgatgagtgttagacctccgatgctgttacgatggcttacaaggatgatgttgtga

SEQ ID NO: 2288 - DNA, 1248 bp, Aureobasidium pullulans; identical to SEQ ID NO: 1901

SEQ ID NO: 2289 - DNA, 2418 bp, Aureobasidium pullulans
atggctgcattactttctctcactgcattggcgttgcttggaggcagtgcctctgcccaaactttccaaggcacagcccagggtggtttccctgactgtgtcaacggccctctatccaacaacacagtctgtgacaagtctgcagaccccattgcaagagccagggctctggtctcagccttcacagtcgccgagaagctcaacctcacaggaaacaacagccctggagtacccagacttggtctgcctatctaccaatggtggaacgaggccttgcacggtgttgccgaatctcctggtgtgaccttcaacgcaactggagagttccgctatgcaacctccttccctcaacctatcaccatgggcgcggctttcgacgacgagctcatcactgctgttgctgagatcgtaagtactgaggcaagagcattcaacaaccacggtcgtgctggtctcgatttctggactcccaacatcaacccttacagagatcctagatggggtagaggccaggagacgccgggcgaggacagtttccacttatcctcatatgttcacgccctcatcttgggtcttcaaggtggtgaggatcccgaaatcagaaaagtcaccgcgacctgcaagcatttcgctggttacgacatcgagtcatggaatggcaacctccgctaccagaacgatgttcagatcagccagcgtgatcttgtcgagtactacctgccttctttccgttcctgcgcaagagactccaatgtcggagctttcatgtgcacatacagcgctttgaacggcgttcctacctgcgccgatccttggcttttgaatgatgttcttcgcgagcactggggctggaccaacgaggagcagtgggtcaccagtgattgtgattctatccagaacatttacctgcctcacaacttcagcgacacccgccagggcgctgcagcggctgcactcaatgctggtactgaccttgactgtggtacttactaccagcatcaccttccccaggcttacagcgagggcctcatcaaccagactactgtcgatcagtccctgctccgtctgtacacttctctcgtccgcactggctactttgatggtcccgacgccatgtacagaaacctgactttctccgatgtcagcactcctcacgctcaacaagtcgctcttactgctgctgaagagggtattgttctgctcaagaatgacggtcttcttcctctcactgtcaccaacagcactaagatcgctgtcattggagactgggccaatgccactcaacaaatgatcggtaactacttcggtgttcctccttaccttcacagccccctgtacgctgctcagcagtctggtgctcaagtcttctatgctggaggacctggtggccaaggcgatcctactaccgaccactggctccccatgtggactgccgctgagaaggctgatatcatcatctacgctggcggattggatatcagtgtcgaagctgagggcatggatcgcgagaccatcaactggactggtgctcaactcgatgctatcggtgagctcgcaagctacggcaagcccaccatcgttgctcagatgggtgaccagctcgacaacactcctcttctccaaaactccaacatctctgctttgttgtggggtggttaccctggtcaagatggtggtgttgctctgttcaacattatcaccggaaagactgcacctgctggtcgtcttcccgttactcagtaccctgcccactatgttgccgacatccccatgaccgacatgactctccgtcccaacgagaccactggctctcccggcagaacctacaaatggtacaatggcactgcagtcttcgagttcggctacggcatgcactacaccaacttcaccgccgacgtcagccccatggccgcctctagctacgatatctccgctttgacctccaattgcaatgaaacttacaaggacaagtgcgctttcgaaagcgtttctgttaatgtgcacaacaccggcagtgtcagctctgattacgttaccctcggtttcctagccggccaattcggaccttcgccttatcccaagaagtcgcttgttagctaccaacgtctccactccatcgctggtggtgcttctgcaaccgccacgttgaacttgactttgggatcgcttgcccgtgtcgacgatgttggaaacactgttctttaccctggagattatgctttgatgatcgatactatgcctgagaagacgatggtcaactttactttgactggatcgcctgttactctggacttgtggcctcagcctccaagtggtggacctactattcctccttctgattacttctatggtggttatggaagtaggggcgagttccctattgccgctactactgaggttcttgagcctgaggagtag

SEQ ID NO: 2290 - DNA, 825 bp, Aureobasidium pullulans
atgccagcactcaaaggtcaactagtcctcctaaccggagcttccatgggcattggcgcagcgattgctcgttcactagctgcatcgggagcaaatctcgcactcttctcccgctcagaggataaattgcaagcattggctgaagagatcaagtcagctcatgaaggagtcaaggtcacttacagagcagttgatgtaggagaccatgaagctgttgataaagcagtgctttctgtggttaaagagatgggtgagattgatgtattgataaacaatgccggactcgccctaggcgccccaaaagcattcccagatctcaaaatcaccgacatcatcaccatgaacaacacaaacatcaacggctacatgttcgtcacctacagcgtgctaaaccactccatgcgcaccccctcccgccacacaggcacaatcctcaacatcacttccaccaccgccctcgaagcccctccctttcccggcgaggctgtctatcatgccaacaaagcttgccaagagggcttcaccaacgccctcagaaacgagctctgtggtactgatatcagggtcttagcgctcaggcctggagtcgtggggacgcattttcatagacagagggttgggtttgatgatggtatgtatgatgattttatggatgggtataagcctttggttccggaggatgttgcggagtcggcggtttatatgctcaatgcgccgatgagtgtttcgataaaggcgctggatgttgtgccgtctgctcaaagatctcttaccgtgtttgacagagagtggagtaagcgtaacgagaagaaggatgcaaactag

SEQ ID NO: 2291 - DNA, 1095 bp, Aureobasidium pullulans; identical to SEQ ID NO: 1904

SEQ ID NO: 2292 - DNA, 831 bp, Aureobasidium pullulans
atgacaaagttattcggtctctcggtggtcttggctatttttgcggcatcttcctcggccacatctctcaatgagacggaattactggagtctcgggcagcagcgacgaagaagtcttgcatgattactctccccggagtcggcagattcaaccaatacgtcaaatacgactttgcgaagtggtcaaaatttcctttgggcttgtcaatcagcaattacggcatcacagcagaccctgaggacgaggaacatccttttgatcagttctacggacccaagaatgtcgtcctaaagagaggcaggcctttgcagttgagggtacccggaggccagactaagtcgcctatccaaggagccgagtttaccacggcttacgacgacatcctattcgcatctgtacgaacagtagcgaaagtcagcaatgtggcaggaacatgccatggcttcttcttctacaaatccgacacccaagaaaccgacatagaaatccgcacatccttccccaccaccatcttcctcacaaaccaaaaatcctcacccaaagccctaacctcaacctttgacaccaaatcaccccttgacatgacttccgacttccacgaatacagatttgactggttgaaaggcgtcaccaagttctatgttgatggcaaattcgtggggtcgttgaagaagaatgtgccgacgatgtctgggtcgatggtttggaataactgggcgaatggggggagttggagtggtgggccgccggagagggatagtgtgcttgagatcaggtcgattgagatgtattataataggactagtgttactggtgttaattgtaagtag

SEQ ID NO: 2293 - DNA, 1722 bp, Aureobasidium pullulans; identical to SEQ ID NO: 1906

SEQ ID NO: 2294 - DNA, 1608 bp, Aureobasidium pullulans; identical to SEQ ID NO: 1907

SEQ ID NO: 2295 - DNA, 1302 bp, Aureobasidium pullulans
atgctacgcaccctctgggcaagtaccttggtcactggaagtgcacttgccctcaatgatagagtaggcaaactcccggctctaggctacgataccttcaacgccttcggatgcggctacaacgcttctgacgtggccgctcaggctgagatcatgaagaagaccggcctcatcgacgctggctacaatttcatcatcttggatgattgctacgcactcaaagaaagaaacgcgactgggtacatggtggcagaccccgaaaagtttccacttggcatgccagccttctcatcgcagatgaacaaattaggcatgaagctcgctgcctacggtgacagtgggtatgaaacttgcgctgggtaccctggatcatatggtcatgagctacaagatctgcacacctggcactcttggggcatgtcgtatcttaaatacgacaattgctatatccccgccgataatgtcatccagcaaaatgtatttggcaaatacaaacgaatgtccaatgccattgccgaatttgccaaagagacacatgtgaccttccagtactcgctttgcgaatggggatgggaacaaccgtggatttggggccgccggatcgctcaatcctggcgcaacgatggcgatatcaagccctactggagttctctcgcctcgatcattaatcaagcttcctttcaatattgggccagcgacttctatggtcacaacgatatggatatcctcgaagtcggcaacaccggtcttggaacaccacccggaaacttgacttacgaagaagcaaagagccatttcacggcttgggccttgcttaaatcaccattgatcattggaactgacctcaccagagcaacaaatcagacgctcaacattctaggcaaccgcgacctgattaagatcaaccaagatcccaacgtgggtcagagtataagtccgttccgctggggcgtgaaccctgatttcgtttcaaatgccacgaatcctgccgaatactggtctggaaactccagctatggcgtcgtgttcatgatcctcaacaaccaggatactccacaagaaatgtttttcaatctgacagagagttgggtcatccgtgcaggacgacagtactctgtctatgacatgtggtcgcacaattatactggcatagctgtcaggaacataacacttcagcttcctgcacatggtgtatcggcacttctgcttaacgatgctggtcccgaacctacgtatttgaataatacatgtgcaatgtactatcagtgctcgtatccaaatggtacatatatctcgaattaa

SEQ ID NO: 2296 - DNA, 1392 bp, Aureobasidium pullulans; identical to SEQ ID NO: 1909

SEQ ID NO: 2297 - DNA, 2001 bp, Aureobasidium pullulans
atgacatacaacaatgcccatttcctcagtctggtcgccgctacatcccttctcgccgtcaattgtcttgcgcaagctcctccgacaccgcaaggattgacctacgtcaactccaccgtctttccaggcgcatccatctctttcaaggagaccacgatatgcgagaccaacgaaggcgtgaggggatggagcggatacgtcaaccttccacctgtgccttgggaaggccagaactacgaggtacatacttggttttggttcttcgaggctcgaaatgatccggcaaatgcccctctttcactttggctccaaggcggtcctggcgcccccacttcagtctctgctgttaacgagaatggtccctgtgtgctgctgaacaactcgagagaatcggcgaacaatccttggtcttggaattacagagtcaatatgctatacatcgaccagcctgtccagactggtttttcatacgacactttgatccagggtgttgtgaatgaggtactgtctcctttcgccgtcttccctggtgcagatcaaacgacgaacgagactgcccttgctggtgtcttctcctcgcagaaccccaggttggcgccaaatagctctgacgccgtcgctccagcaatgtggagattcatgcagacctggctacaggacttccctggataccgaggcgacaaagacaagttcagcatctggggagagtcttacggaggtcactgggttcctacttttgccgattacttctactcgcagaacgcacgcatcgaagctggagaattgaacggaacttctctcgccatcgactcgattggtctgatcaatgcttgcatcgacgccgagactcagatgcccatgtatcccgtcatggctgcgaacaatacctacggtatcaagatattcaacgatacggcctatgctgcgtccatggcagctttgccacaatgtctgagctacaccaggcagtgcagagagctggctgcctcgctggattcttcaaaaagctcaggaagtgatacggaggtcaacagcgcttgtggtaaagcatacggctactgcttcaactatgtcgcgagggagactgggcttggaggtcttcaagattatgatgctttccacttcgacatcgcttcgccgctcattcattcgtttcccccacgatgggcagccggatacctcaacaacgcgactgtgcaggaagatctcggtgtgcctctcaactttactggcttctctgccaccatcgctggcgagttcgaagctgcaggcgactttttgaaaggcgacaatcttgcgattcttggacaattgctcgatcgcggtgttaaggttgctctcatgtacggcgatcgcgactaccagtgcaattggttcggaggtgaagccatcagcctagccatcaactccagcacttctgccgactttgaaaaggcaggctacacgaattttgcgaccaacgcctcgtacaatggaggtctgactcgacaatacggcaacctctctttcactcgcgtcttccaagctgggcatgaagtctcgtactatcagcccgaaacctcgtacgagatcttcaatcgcgtgatcttcgatcgcgacataccgactggccaaacgtccaccgctgcctccgactcctcgtcgccgtacgcaaccacaggcaacagctcagccctcgtctccatcggcgcacctatcaagttcgaatctgatgtcgtctcttgctatctctgggacatcatggagacctgtacactcacgcagacggcactgttcaagaatggaagtgctatcacagaggatttcgtgcttgttgggtacgagcgcgctgatggatcaagagtcttcttcaacgagagtacagttggtggcaatggtacaaacaatggaaatgggtcgtcgccggtgccgtacaggccaagcaatggtgcgtcgcatggtcctgcgagagatctgtggctggttgcactcgctgtcgctgccgtcactgcgcttctgtag

SEQ ID NO: 2298 - DNA, 1668 bp, Aureobasidium pullulans
atgattgttcttatcctctttctctttggtgcgggtctcgccaatgcacaagcgataccgaccgcaagtcaatgtccctccgcgaatgggcagaccatcaccgacagcaacggcagcacctatcgcgttacctgctccgctgacaacaacgtcggttcatatgccaacaccaaagcagcaaactcctatctcgactgcatgactgcttgcgatgcggccgcatctgcgggctgtcaaggctttacctatgttggtggtgccaatggcgtgagttcgggaacgtgttggctcaaaaagtccataggcacataccctgctgctccaagctcctacgtctcagctgtcagaattggaaatgttggcgcatcatctcaaagcagtgttgcgtctactcttgcgacagtgattacctccgcatcgtctgcatcatctgcattatctgcatcgtccactttgtctactgcggtcgccgcttccaccagcttatgtccatcttccaacttcacgtctttcgtagacactgcaaggaacaattggcagattttgtgtggttttgacacaagcccgggatcattcggctcaacatccgcaagcaccttccccgcttgtattgaagcctgcagaacaactgcgaattgtgcggctgttacatacatcgggactagttgctacttcaagaccgctttcgtcagcctaatcaccaagtcttcagcgagcagtgcattcatcatcaacctccagaactacccggtcccagtgacgggcaacagcagggcaagttcaggctgtggtgcccccctgctccctggagttcagctcggaggcacttctaccactttccagatcacctcgaagggtcaagtcaggtcgttcaatgttcacgtaccaacgtcatacaagaacaacatggctgtgcccttgatcgtcgcgtatcacggtcggtcaaacacacagctctctgtagaaagcgattcaaggttgtcgagcgaaacatggaatccattcgccatcgctgtctatcctcttggcggtgatcaacaatggcagggtgatccggcgactgttggtacaaacccttattacgacgatttggcgttcaccagcgacttgctcgactacatctccaactattactgtatcgacacgagtcgcatgcttgcaaccggtttttcaaacggcggagggtttgttggaactcttgcttgcgacccgacactctcccaacgtttcagcactttctcggtgaactccggcgcagagtataccaacaccaccgggagctgcaacccaacctccgttctcacgaatacgattgtccagccaatatgttcgccaggtagatcaaacctcccgatgatcgaatttcacggcgacacagacggcactattccctacccaggcggtgctcgacggggatattgtctgccaacagtaccgcattgggtcactgattgggcaataagagatggtctttcgacttccaatatcaccacatcattggcgagtggcaaggtgaccaagtacgagttcggtgcttctcaaggtgtgcagggtttggtcacccactacaaggttgctggctggggacattcttgggcaagcatcaacgctggcgctccaattgatgctacgcccctgatcatggacttcttctacagccattcgtag

SEQ ID NO: 2299 - DNA, 5763 bp, Aureobasidium pullulans
atgagcttctacttcttgctcagggtcttcgccctttgcgttcttgcacttctagtcgctgcagatagcccgaaccattcagaaatacacggccgctcgacaatcaagacagcaaacaagctctcctgtatcaaatcagacgtttcgctggtgaagaaggaagtctctcatcctcttgagttctgcaaattctatctgtcagacaagcgaactcgctctccattacctagtctaggtgtcacagcactccaaaatgcttgcaaatgcattcaagcatcgccaccgccggagcccaccatcatccatggagcccttccttccaacaagcaatgcagccaatggaccaaattactgaatggtgaatacaagcacgttgctgagttttgcaacttctacctcggctacccgaggaagcgatcacctgtaccaggactctcagtgtctaacttacttacaggctgcaaatgcgctataggatccacaactgttgcttccgtagcaaaggctcagcagacttcaacagcaagaaccctcgcgtcgaccaaatattcgagcattgcaaagcaagccacatcaagcgcttctagccgaatcgcgaaagcgtctacaggtacagtcgcatctactccgcaagccactttgtcatccaaagctgcgacggtgctgggctttgcgtccagaatctcaccattaccttccgcaacgaagtcgtcaacttcggtggtcctttcttcgacaacctctgaaacagattcggcgacacgcggagcccccaacgtgtccgcatatatcgcaacacctgcttcttcctcgcaggtcactccattgcagacctctggcttgtctgcttccacagtattcagatcgtctgaaagcaatactccgacaacgagaaaaacttacacctcgataacggcgaccagaggcatgccaactaccagcagcgctcttagtgcaatcttaagcgcgacccaagataaaacagtgttcacagcagccgaaacgtcttttcacagcgatgttctggaggtcggcactctagcatcttcaacggactcggcctcttcgtcagttggaatgacattccaatcatccagcacagcgtacaaatccatcacggtcatcaggggtcaaccactcagcacaaagatcaaatcaactgtttcctcgacatccatcgcccctacacaaagttccatcgacacgagcagtagcagtcagactcaacagaaaacttcaatgaggtgggcttcgatgagaggcaagcttcctattactactctcacgacgcagacccgagatctggcttcaatagtggcattcatatcgtctccagatgcatctgcaagcggaggcaccgcaagcactttcgcgcccagtgattctgttggctcggtatcagtctcccgcagcatcgttcccccaactacgtctagtgctgcaacagaatcctccagagcgtcaacttggaccacgcaggtcaataacagctcggtggcttctgagaattcagcatcgattgtccaaggccgaacttcgtccgctcggaacgtgccttccaccagcacaacttcgcccgcttctggtctttcgggcagtccgtctcgaggaaccgaatcaacctctactactatgcaatacaaagaaattacatctggaaaacaaccagacacttcggctcttctagccacaatcagcaagtctgatacttcagtcttgccgacgtccaacattcttaccacggcatctcctttgacttcaaattcacgtatgcaaaaactttctgaactctcaacaacagcagctagaagtctcgagacctcatctacctatactgaattggaatacccgacatactctagtgatggcggttatccggaatggacgccgaccaaaacctccgaaactacggctgatcagcaatcatctttgactttcatgtcctctgacaaagcccctggtgtttggatcagctcagacactccttcaagcactcccgatctttcacaaacctcaaaattggcgtccatatcttacaaaaaccccatatatcatgagacatctgcgactcttgcaaccacagatctatccgagtccattgtggccctccttccgaccgataaaccttcgatttcctttgatacagtatcttctgacagtatcatgccatcgagctcaagggacccaagtaacgactatgagccctctcgaacggcagtactcagcagcgatggcgcgcaaagctccgagcaaacgatcgcaactaggatcactcctcattcaacagtggacacgatcagtggtatctcagtcactgagatcaaagctatgtcagccaattccacgcaaggagagctcgtgttgtccgcaaagaccgcaagcgcctcgactacgataaccacacagcaatcttcagcagtcactggtatcggaagcgaagcattacacagcacttcggaagaatggcgttcctcgactatctcaagcgtttctgcagcttcgatgagcagtgaaagctcggggctccttagctcagcaacatggaagctgaccacttcattcttgctgaccgcagtttcttctgagaccgcttttgagacgtcttcttcgaaatttgcaaccattgaaagctcgagcacaactgaatctctaccagatcctttaccatcttccgggataaacagtctcgaccacgattttactccaatcagtgattcgcaacatgcctccactactgagccgcccaccgaatcaactgtgaacagttctgcgactcttacaaactcggcgcaaacatcaatcgatcctgaaacaactccctttacgagtcttgcccagcacaatcatggttatctgaacgtcacatcccaaaattatgacaactcaacgcgaaattctcaaacaagctcgggtcctggtggagaagcgatcaccccatcttcatcaatgagtgaacgaattcttgacagctctttgtcttcatctgactccagcactgtcgcagaaacagtcgtctcggtccaaacaacgaatgtcgcagatgattttgtgagctccagatctcaagagttgttggtcagcatgttctccatggctagcagccacagcactagcgcgcaggttactactgctatcgactccctatggttgaatgcgaccagttcaactggctcttcctctgttgagacgaactcgttctcatcagcagtcccctcaagcatattcccggcgtctgagatggtcttttctactgagtcatcatcttccggctcaccgtcaagtacaattatcgggcagaatttcttaggcgcatcctcgggtgattcgtcgactgaaggttcaacgttgacatactacaagcctgcaagtgtgtctgcctcaccaacgattagctatgatgctattgcgctgacaacgacttcatcatctaccacatcagatgtttcagctggcacttccgttgacggcagcagttacacagacttgacaaaccctgagactccagcttcacccaatactgacatcggaccttcgcaaaccgagtcatcatccatcgcgaatgctccggatccaactatgaccggcttcgaagacaccgatgactctgtaacaccgttaccggattcatcttcagacatcagcagcatcgacgaccgccagacgcccattgctgcatcaagttcagcggaggagccatcaagttcatcagtttcgctgcctggagtcgcggagacttcatccagtgattcgagcagttccgaaacaagtcccatattcactggcactactgagccgtatccaagtgcaacctccggagctattgatattgatgagcatttcgttgatgtagttgctgaagggacaacctcatcttcatcgacagtagaaccttcaggcacgagcttgactggagagacaacaatccagaccattgcagaatctactttgcaaagtccaagctctgtctaccactctagcgaggcaaaatcaaccatcgccgaaatggacaccggctccatgccttctgcggccacttcttctgccactttcccagacgatgcaaattttacaacgccatcttcgtcggaggctcgagttgagacagcaatgattccttcttccaagaggacaagcactttccatgcccctagcaatacaacttacacctctcttgagatggacatagactcagtccccgctgcaacatcttcttctgcgacgatttctagctcgagcattcccgaaccattgctcacggcttcttctccatcaccaagcgatgatctcggctggacagaaacatcaaccactccaaatccgtactcctcggacgttgttgcacaggatctatcatcctcttcgactagcttctcggaaactctcagcgtagcctcctccagcactttgcagagcagtatctctggtccaatgaatatcgcttctgcatcagccttagagtcgagtagttctgagtatgcgcggtcgatcgcgatcacacaaaccgactctaccgattcaacgaccgaaagcaccaccatgccaatggcggagtcttctgcgtctgtgtccagctttctcatcccaagcagtagcacacagttcccgtctgccatgagttccagcgactccactgaggaaccatctagctctgcatctttcacctcccttggtttctgccagacaggtgctgcttcaactctcagctcatacccatcagcctcgcaattttgttcgtcattcatggcgcctccggtagttaccgcaactaccacaatctataagacatcgcagagagtcgttactcaatactacagcaactccacactcaccacgaccacgtgcataccagccagcaatagcggtaacaacttcagaaaacgagatgttcctgccacactggctgcacaaaccacatacctctggaaaagagatgatgctggagatgcgggcaccgcctcagtaacatgttcggtcgcaccctctgttctaagtggatactcgtgcgacgatacgcctacgtcaacagcgactgtcactagtggcattcaacaagcaggtgccatcgtacaaacaactacggaatcaatcactgtgaccgtaatctcaagctcaacctcctacatcccacaaacaagcacagtgctctactgtccacgcccctcgtccgactgtaacaacaaaggctacttgtttgcttattacggcaacgagccctatggcaatgacgtcgcaaacatggatgccacgtacaccaagcaaatgactccaacatacaactccaccacaaaccaaggcgtaggcatatacggcagcgaatggtccagcgtttcactctacggaagctcgcagatgtattcagacaactacttctacctctcccacaaaggatatttcttcgcccaagtcactggctactacaactttaccatcaaagatgccgatgacattgcatatgtctggatgggcgatgcagcatactcgggatggacaggaggacccagtggtggcaattatgttgccaaagctagatgttgctggccgccggagaatacgaacacaacgacatattggatggaggcggaaacatatgtgccgtttcgaatcgtattgggtcagcaggatggatccacttcgcttggattgacgatcacggcgccggacggaactgtcattttgcagactggcaaagagagcgattatgtagtacagtattcttgtgatggaagtgcgccaccgtttccggattgggggtatgagacttga

SEQ ID NO: 2300 - DNA, 1788 bp, Aureobasidium pullulans; identical to SEQ ID NO: 1913

SEQ ID NO: 2301 - DNA, 708 bp, Aureobasidium pullulans
atggttgccggtatcaagctctggcttgcagctctcttgcctgttgctctcgcctgcaatggctacactggcggcgttcccaaggcagttggcaccaagaccaacaaagcagtcatcaccgtcaaggccggtcaaacctttgacggcaagtggaaccgctacgaccgcggcgctggcgcctgcaacggtcaaggtgaaggaggcaaagccgacgccgtcttcctcctcgaagccggagccacactgaagaacgtcatcatcggcaagaaccaagccgaaggcgtccactgcgacggccactgcaccctcgaatacgtctggttcgaagacgtctgcgaagacgccatcagcatcaaaaacgacaagtccggcagccaatcctggatcatcggcggaggcgcctaccacgcttccgacaaggtggtccaacacaacggctgcggcaccgtaaacatcatcaactactacgtcgaggactttggcaaactctaccgcagctgtggcaactgcaagtcgcaatgcaagcgcaatgtctacatcgagggtgtcactgctaaaaatggagatttgctggttggaattaattccaactatggagataccgctacgatcaaaaacacttgctctgatgctggaaccaagtgtcagatgttcaagggttgtgccggtggttgcgagccccccaaggccggtctctgcactggttaa

SEQ ID NO: 2302 - DNA, 2427 bp, Aureobasidium pullulans
atgcgtttcaccacagagctgctggccgttgcgctggccctcgcagatgttacctctgctcagaactcaacatataatgctactgcagctgctcaggctaaattgactgctgagttggccaaccttgagaagttctggtcatatggaagatctcctccagtgtatcccactcctcaaggagcaggcagagatgagtgggccactgcttatgagaaagcaaagaccttggtcgcttcaatgaccgactacgagaagaacaacatcacatatggttacacctcgaagacaaatggctgtggtggtaacagcggctctgtacccagagttggtttccctggtctctgtctcagcgatgctggaaacggtctccgtggtacagatggtgtcactggttttgcttcgggtgtacacgtcggagctacctggaaccgcaacctcgcataccagagagcccactacatgggtgcagagttcaaggctaagggtgtcaacgtcctcctcggacccgtcgttggtcctcttggtcgcgttgccgaaggtggcagaaactgggaaggtttcagcaacgacccttaccttgctggtagtctgacttttgagactgtcagaggcatgcagaataatgtggtttcatgcatcaagcatcttatcggaaacgagcaggagctcgaccgtaaccctgctggagtcaacgcctcgatgtctgccaacatcgacgacaagaccatgcacgaaatgtacatgtggcctttccaggacgctgtccacgctggagtcggatcagccatgtgctcataccagagagccaacaactcttacggatgccagaactccaaggtcatgaacggtctcttcaagggagagcttggctttgagggtttcattgtctctgattggggtgctcagcactccggtgttgccagtgctgatgctggtctcgatatggctatgcctagctcagcctactggatgaacggcaacttgagccaggccgttaccaacggatctcttgcttctaccaggctcgatgacatggccactcgtatcgtcgcttcttggtaccatcttgccgagtggcaaaaccctggccacggcatgcctgtcaacctgacccttcctcacgagtacgtcaatgctcgcgaccctgcctctaagcctagtaccttccaaaccgctgttgagggtcatgttcttgtgaagaacgtcaacaacgctcttcccttgaaggctcctggtttcatctcgcttttcggttacgatggtatcgcaccttccagctacactcccgacaactcgcccgccttcaccctgtccaacttcggattctcgcccgtcagcggtgttaacagcagtgaacttcttatgctgtttgtcaacccttcatccattccttctgagaacctgcccggtatcgccatcaacggaaccatggtcaccggcggtggctctggtgctgctcagcctgcttacatcagcgatccgttcaatgccatcaccgagcaagcaatgcaggatgacacttggctccagtgggacttccacagccagaaccctgtcgtccagagaggatctgaggcctgccttgtcttcatcaacgctttcgccactgaatcttatgatcgtccttacctggaggatgagtactcagacgacattgtcttgaatgttgctgctcagtgcaacaacactatggttattctgcacaacgctggtatccgcaccattgacgcatggtactcgaaccccaacgttactgccatcgtctacgctcacctccccggacaagattcgggcaaggctttggtcgaggtcctctacggaaagcagtcgcctagtggtcgcatgccctacactgtcgccaagaagcctgctgattacggcaacctgctgcaccacctcactcctgacaacaccagcaactactacacccaggacaacttcaccgagggtgtctacattgactacaaggctttcatcgcccagaacattactcctcgcttcgagttcggatatggtttgacttacacaaccttcaactactcgtcgctgcagagcaaggttctcagcaatgtcagcactgccgagtaccctcctagcagccccatcgctcaggggggtgttgcctccctgtgggatgtcattgctactgttgactgcaccatcaccaacactggctcagtcactgcctctgaggtcgctcagctgtacatcaacatccctggtggccctgccaaggtccttcgtggattcaacaagcaaggtgtccaacccggcaagagcgtcaacttccacttcgacctcaccagacgtgacctaagcgagtgggatgttgtcagccaacaatggcgcctgcaatctggcaactaccccatctatgtcggcaagagtgtactcgacatccagcttaccggtagcctcagcatctaa

SEQ ID NO: 2303 - DNA, 840 bp, Aureobasidium pullulans
atgtcttcattcttcgcaaaggccttgactctcggcgctctggcagcgcccatgatcgtctccgccgctccctcttccatggtcaagaagtctcagatcatcaccacttctgccaaacaagctgctgttgacctctgcggcactgctgataatctggtcctctatgataccccatggatcgtatacaacatgttctacggcgctgcttcttccgtcggcacacagtgcactcgttacgatcatgttgttaccccatccaccggtaacaaggaaattgtctggagtgctgagaccaatatccaatatgtgaaagccaccgacaacgtacccaaaggttacgccttcgtcggactgacccagaacctggaaaccaccatctccggcatctcatccattcccacaacatacacctggacccgcaccaacaccaccgcattcaaaggaaacgtatgctacgacttcatgacctccaacaccaaaggcgactccaccacctccaacgcccaggaattgatgctctggttgcaatatgaaggcggtcaattacccatcggttgggctgctggcgccaaagccactatcaacaatctcttcggcacgagctggaagttgtatgagggtaagaatgatgatactggtattactgtgcataccatgatgcccgagaagcaatttaaaggcagttttagtggtgatcttaagctttggctcgaggctcttgtgcagcatgggactttcaaggactctacctacgtcaatgttggaaatgctggcaccgagtacttttacggcaacagcaacttgaacgctaccctgggtctgcagatcaacctgaactaa

SEQ ID NO: 2304 - DNA, 993 bp, Aureobasidium pullulans
atgctttcttacattctggccttgtgcctcaacctctgcctggtgctggccgccagcagaactactgctcccagtggagctcttgttgtcagcaaagcccctgccaaaggacaatactccaagatccaggatgccgtcaatgctctttccacttcttccaccactgctcagtccatcttcattgaagctggcacctacagcgaacaagtctacatcgcaccccgcaaagccgcccttaccatctacggatactctgagaacactgccgactatgctcacaatgtcgttaccattacgcaaaagctatctcagaatgaggtcgcgactaacgatctgactgcgacccttcgcgcgtggtccaccaacttcaaactctacaatgtcaatgtggtgaacagctacggatctggcaaacaagccctcgccctcaatgctgcagccgccaaccaaggctactacgcctgcaagttcatcggtttccaagacacgatcctcgcccaaaccggcacccaactctacgcgaaatcctacatcgaaggcgccaccgacttcatcttcggccaacacggtctagcctggttcaccggctgcgacatccgcgtgctttccgcttccctgggctatatcaccgcatccggccgcgcgtcctcggaggcaggttactacgtcctcgaccactgctccatcgctgctaagtctggagccacggttgcaaagggcgcttattatctcggtcgcccttggggagcgtacgctagggttgctgtacagagttcgacgatcagtgaggttatcaatgctgctgggtggcatatttggaatactggggatgagaggactgatcatgttactttcggcgagatcagcaatactggcgtcggtgcttctggggcgaggaaatttgagaccaagttgagcaaggctgttgccatcgctgatgtcttgggcagtgggtatgccagtgctgcgtatgttgacaagacttatctttga

SEQ ID NO: 2305 - DNA, 1605 bp, Aureobasidium pullulans
atgagagtttctacgtatctcgctgcacttgcaacagctgcttgtgctagtgctaaagtctggggcaactctactactgctggctcagtcacttttgacaacaacagaagattgctgtttgataccgatggcaatcagatcgatgctgttggagctaagatcaatgaatttggtggcagatattatctttatggtaactctgtttctcaaaaagatgccttttacgggatcaagagctactcttctaacgacttgctgaactggcaatacgagggctacctcttcgatatcgatgatggaaagaacccatgcaccggatcaggaggctgtggtcgtcctcatatcatctacaaccagaatgcctcaacttacatcctatgggcaaatgccggctctgtaggctaccaagtcgcaacttcggactcgccaaccggacctttcgtcttcgagtcgtctcctgcgatgattgaccctcaattcgatggcttgcaacctgcagatcatgccgtcgagattatcgacggaaagggctaccttgtcttctcagccctcaacttccgcgaccctagagctggcagcttgttccctcaagtctaccagactctccacatcagcgaattgacagatgatttcctcaacacgactggtgtcagttatccagtcgcttcaaatgccactgcagagctggactttgtcgaccaacaagccgaatcgcctgatatcttcaagcgtggagactacttttatattggcggtagcaacacctgcggttactgcaatggcactttggccttgctttaccgcagtgaatctatccagggaccttggactcgtcagattctggctgggtatggatgtaacagtcaattcgagggtgttactcctcttactgatcccaataccggagagaccacgtatttgtggtctggcacttctgtgtctggaggagatccgcgtgttgggttcagtggtcatatttaccagcctcttgttttcaatgctgacggtagcgtccaagatttggattgttctgttgatgctgagtttactgttgcgttcccgagggataacagtacgactgctactggcaacgcgacggaggctggtgatgcgtcgcctgctcttgctgtttacagcgctgtttgcgactctgacttcttcactctgtaccagacttggcctgcttcccaagacggcactgtcgagagtgtttcgctcaatatggctcgtggacaccaggaagctgctctttcgttgactttgttcaagttcagctctcacgaggaccttttgactcccggatacaagtggacgcagctgggcacggcatctttctttgccaaccagacaacctgggtattcgataccgttactgtgcccgtaagcaccaatggtactgtttccaagggagaattcctcggcgtctctatcgcaggcttcgatgtttcaccatggtgtcatctcgagtacgatggtgctgatgaagattacatcttgtatgcccaaggaggtggccagtactctctgcgtggcgcacaaggcaagacgtcgcctgtttaccagcgcgtcggcaagagtgtaaagttcttcgcaacttatgcgtaa

SEQ ID NO: 2306 - DNA, 1389 bp, Aureobasidium pullulans
atgagaccttcaactctccttctcgccgcttccggctctgcagtccttgctgctcctactcctagtcttctcggagacattttgagcttgaccaacaatgtcatcaccaccgtcacctcgaccatcaccaataacttggcccagcaagttgcccagctcggctgcactcttcagaccaatgccaacaagcatggtcagatcatcagctcggttgctcttaccgtccaggccatcgaggtcgccgccaagagattcactcagacttgcaactggtccaagcctggaaagtcatacatcaattggtctacctacaaggccaacggtgtcaacctcggtgcctggttggagatagaagagaattacgataccgaatggtgggccgccaatgttggatcattccccgatgagtggacctggtgttctaccgttggcttctccgtctgcggacccctccttgagaagcgctacgcctctttcttcaccactgccgacatcgacaagatgggtgctaagggtatcaacactctccgtatccccaccacctacgcagcctggaccaaggtccccggcagcatgctctactccggtaaccagcaagcttaccttagaaccttgaccaactacgccatcgacaagtacaacatgcacgttattgtcggtctccactccctgcccggtggtgttaacaccctttccattggtgaagccttcggacacgacgcctggttccagaacgccaccaacctcgactacagcttcaaggccattgactctatcctgaccttcatcaagacttccgatcgccagaactctttcaccatcgcccctatcaacgaggccagtgacaacttcgccgggttcgccacccctgccggtcttaccaacgacggtgttaactggatcaacacctacatcaacggtgtcttctcccgcatcgccaaggttgataagagaatccctctcatgcttcaggactccttcttcagcgagcagttctggtctcccttctacgccgctggtaccaacctcgtcatcgactctcacatctacttcttcgccgccgctggtgcctactcccagtacgtccccgctgccgtctgtggtcaggccaagtacatcggtcagggtgatggcaagttccccgtcttcattggcgagtggtccctccagactctctacaacaacaccatcgacaacagaaagactctctacgacactcaggtctacgcttaccagaagtacgcttccggtggtgctttctggaacggcaagatgttgaacaccagagacactgttgatggtgagggcaagctccaggactactggtcatgggagggtctttctgacgccggtgttgtgtctaccaccttcaaccagagctactgctag

SEQ ID NO: 2307 - DNA, 2940 bp, Aureobasidium pullulans
atgtccggtttcaagagtcttgccctgctattggcagctcagctcgccaatgctcagggtggctaccctaatcctcccgttgatggtttgcctttccctggtaccaactaccctggctccgaagtcccctacgccgtggctggtgcaaagttcaaccagacctctcccccttactacccttctccctggggaaccggtgctggagaatgggcaggtgcttatgagaaggccagagcattcgtctctcaattgactctggccgagaaggtcaacttgaccactggtgtcggttgggagtctgagctctgtgttggtaacactggttccatcccacgtctgggcttcaaggccctctgtctgcaggactccccattgggtgtcagattcggtgacttcgtttccgcattctccgccggcgttactgttgctgccacatgggacagaaagcttgcctacgagcgtggccatgatatgggcagcgaacaccgcgacaagggcgtcgatgtcatgcttggtcccgttgttggtcctcttggccgcagccccgaaggtggacgtaactgggaaggcttcagccctgacccagtcctttctggtgttctgaacgccgagaccgtcaagggtatccaggatgctggtgtcattgcttgcactaagcactacatcctcaacgagcaggagcacttcagacaaggaggtcccaacatctccgacgccgtctctgccaatgtcgacgacatcaccctccacgagctctacgtctggcctttcgctgatgctgttcgtgctggtaccggcagtgtcatgtgctcttataaccaggccaacaacagctacgtctgccaaaactctcacctcctgaacaaggtcctcaaggccgagctcggtttccaaggcttcgtcgtctctgattgggctggtcaacactccggtgtttccagtgctctcgctggtctcgatatgaccatgcccggagatgtcagcttcgacagcaagacttcgttctggggtgccaacctcaccatcgccgttttgaacggaaccgtaccccaatacagaatcgacgacatggctgttcgtatcgttgctgcctggtacctcgtcgacagagaggacactcagctcgaggatggccccaacttctcctcgtggacctcaagaaccgaaggataccgtcactacattgcccaagaaggctttgagaagatcaactctcacgtcgatgttcagggcaaccaccgcgacaacatccgcgaggtcgctgccaagggtactgtcctgctgaagaacaagggcggtctgccgctcaaaggaactgaacaactcgtcggtgttttcggcgaagatgctgccgacaaccaatacggtcccaatggctgctcagaccgtggatgtgacaacggtacccttgctatgggatggggatcaggaactgccaacttcccttacctggttgcccctcacactgccatcgagaatgaagtccgctcccacggcaagtctgtcgagagcatcttggacagctacgcctacagtcagattgatgttcttgcccaacgcactgacgaagtcaatggtgcttgcattgtctttgccaacgcagatgctggcgagggctatatcatcgtcgacggcaaccaaggagaccgcaataatcttactctctggcaaggtggtgaggctgttatcgaacacgtctcatctctctgcaagaacactatcgttgtccttcacacagtgggtcccgttctgatcaacgattggtacgaacacgagaacatcactgccatcctttgggctggagttcccggacaagagtcaggcaacgccatcgtcgatgtcctctacggcaaggtcaacccctcaggcaagcttcctttcaccatgggtaagacacgcgagtcgtacggtaccgatcttctctacgagtacaacaacggtggtgctcctcctcagacccaattcgaggagggtgtcttcatcgactacagagcctttgacagaagcggtgaaacccctgtctacgaattcggttacggactttcgtacaccaacttcagctattctgacatctcggtctcggtcaacaccgctgctcccgcctacaagcctaactcaggcttcaccgatgccgcccctatctacggcactgtctcgaacaactctgccgactacgtcttccccgatgatgtcagacgcatcgagtactacatctaccccttccttaactcgaccagccttcgcgcttcctcaggcgacccctactacggcagcaactacagcttccccgccggttcgtcatccagcgcaccccagcctctccttcctgcttcaggagcatcaggcggtaaccccggtctgtacgatgtcctctacaccgtcactgccactgttaccaacactggtgccgttgagggcgaggaagtccctcagctctacatctcccttggtggtcccaacgacccggccgttgtcctccgccagttcgacaagttctcaatcgcccccggtgcctccaagaccttcactgccgagattactcgcagagacgtcagcaactggagccctgagcttgacgactggtacgtcagcgagtaccccaagaccgtttacgttggttcttccagcagaaagttgcctctcaaggctgctcttcctgctaatggtgccacttctcctggtactggtaacggtggctccggcaatggcacctacaccgttcctcccgtctcagtctctagctctgcccctggcactgccacccttccctcttcctcagcttccaagtcctcgtcgagctcgaagtcatcatcgcactctgccagccattcgacctccaagtcctcgtcccactcgtcttcgtactccactaccaagacccatggtccaacctcgtggaccacctacaccatgcccactggctaccactctacttcatag

SEQ ID NO: 2308 - DNA, 2085 bp, Aureobasidium pullulans
atgcgttattctttagccgttccggctttcgcagccttggctgctgctcttcctgctcctcaggagatcgatcttgatatggtcatcgcacagcctgacatctcctacaccaccactgcttcaagggtcacctacgacgttacctctatcgcagcccaggccacttccgacatctcttctatctctgtcgacatcagcgccatcgctactcagactcccgtcgctgtcagaagaaatgtcggaaagagagctgcttgtgctgctcagcctaccggagttacttcttacgccgtcaatacccccgatgacaccgcatctgctttctcagccaacccttcttttgctgccgctgcttccgcagcccctatcccttctggttactcgaacactttcaccaacttgaacgcctccaacaacgcctacggctacatgggatacaccgctctgtctagctacgacactgagaagtgtgcttccaagtgcaatgccatcaacggctgcatgtccttcaacacctactttgagagagacccttctcttgagcctggatctggatgcaccgaccctgccagtgtgacgatgataaaatgcgttttttggggtggtcctgtgtcggcgtcaaacgccaacaactacggacagtaccgcagcaagttccaggttgttattgctggctccaacggctacatgaacaacactcttgctgtacccgaaggcttcacctctgctcagtacctcggcaacgctgccatcaacgctccccttgaccacgaaggttacgacactttcatgggtagccgcatcttcactgctggtcccttcaacgcttctctctgcgccgcccattgtcaagctcagaacgcttacaacattgcccaccctcccaacaacggctctcccgtcaagatctgcaacttcttcaacacttaccttctctatctcaacaagacctccaacagccaaggccaatactgctctctttacactgaagcttgggactcaagctacgctaccaacaagggccaataccgcgggaacgaccactacatgattgaatattcctactccttcaccaatgcctcaagtgccgggttcaatcctaagaagggagacaccaacggagctgtccaccaagcttctgttgacattcaatacgccactctccagcctttctgctcctccgccctaggatacagcgcactccttgcaactgttactcccacgactgttgttacccctctcgccaccagcactgttctccgcacaaccactactactgcaagcatcaacaagcgcgctctgtctacacctgctgttctgaccaagtaccctgcatctatcgtctccagcgcctgttccatgttggtcagccaagctactagcacctctacctcgactgctcctgtcaccaccatccaggctgccactcagaccactctcgagacttcggtgatcaccgtcactgcttctcctattcctagcatttgcggtaacaagggtatccaatatgcttactacggcggatctcagtacactgagggcgacaacgtcaacgctgtctaccccgagcactatgcaaaccgcaaccccacctgggccgccgatacaaccaaggttggtggtattgacattagctccagcaactctcaagccatctcgctttatggttccagcacacaagtgtcttcgcaatacttcattctgaaccaccgcggttacatcttcgctcaggttcccggtacatacaccttcatcatctccaaccctgacgacatcgtcttcttgtacctcggagacaatgccgtcagcggatggaccagaggtaacgccaatgccgttgcctcttgctgcagcaactatcccactcgtgcttcgacctcgtacaccctcgaagcaggagactaccttcccttccgcatcttcttcggtcaacagggcggtcccgtcagattcgccttttccatcactgctcctgacggcactgttatccttgacaacaacacctctgagtctgactttgttgttcagtactcttgtgacggtacttccgcccctgcctttgctcctttcggacagggtcagtaa

SEQ ID NO: 2309 - DNA, 1947 bp, Aureobasidium pullulans
atgtatctctccttactaagcctgagtgtgttggtctcttatgtcctcgcctcgcctactggaaactatgttatccacgaaaagcgcgatgccactcctatgggctggagcaaagccgaccgcctcgaccgccgtgctctgattccgatgaaaatcgccttgactcaacgcaatattgaacaaggtgccgactacctgcatgaggtcagtcacccagagtctgccaagtacggtcaacactggactgctcaggaggtcgcagaccatttcgcgcccagtgatgagaccatctcgtctgttatggactggttgattgcttctggtatctcctccgacagcgtcaagttgagcaaaggcaagaactggatcaaccttgaagcttcagtcgaccaagcagaatctctgctcaacaccaagtaccacatctacgagcacggtgctaccggtcagccccacattggctgcgacgagtacagtctccccaagcacctcaaagatcacattgactttgttactccctcgcttcacttcgacaccagagtcagagagcgttctgacaagcttgacaagcgtgaggtgacgcccgatactggcaagtcaatcggtcagccgggtagctggagcacccctcacctgggcaagtacatcaacaagtcgcaattcatcaaggaactggaacagtgtgacgaacagatcactcccaactgtctcaaggctctttacaagattcccaagagcactggtaagagtgtgaagaacagctacggtattgtcgagtacactcctcaggcctacgttccttctgatctcgatctgttcttcgccaacttctcggagaagcaagtaggggatcgtcccatcactgaccttgtagatggagctactgttcagcaaactcagatgggtttcaactacaatggcgaaagcaacctcgacctcgagtatgccatggccttgatttaccccgagaaagtgactctgtaccaagttggtgatttggtcgagggtgcatccttcaataacttccttgacgccatcgatgcttcatactgcacatacgaaggcggtgacgatccgtctcaggacggtgtcttccctgatccgtacaagggcggctacaagggcaaggaggattgcggaacattcgcacctaccaaggtcatcagcacatcctacggttacaatgaagccgatctcacacccttctatgagaagcgtcagtgtgatgagtacatgaagctcggtctcatgggtaccagcgtgttgtacagcagcggcgattacggtgttggcggcaacagcggtcagtgtatcgcagccaacggaacctacaactctggaaaggatggccgcttcaacccctctttccccgctacttgcccctatgtgactgccgttggagccactcaagtcattcctggtacgaacatcatcaccgcccttgccagtggcactcaacctgaagaggcttgtgagactgtcatctactctggtggtggcttcagcaatgtcttcgaccttcccagctaccaatcatctgctgtcaagtcttggttcaagaacttccccccaccatacggcgccgaccgtttcaacaacacacagaagactcgcggcttccctgatgtctccgccaatggagccaattacgtcgtcgctatagacggaacctttgctctcgtctacggtacttctgcttcttcgcctacattcggtgctatcctcaccatcatcaacgagagacgtctccaggctggtaagagcagtatcggtttcattaatcccaccctctacgctcatcctgaggttctgaacgatgtcactcaaggaggtaaccaaggttgtggtactcccggtttcactgccagcaagggatgggacccggtcactggcctcggtactcccgactccgtcaagatgctgaacttgttcatgagcttgccttga

SEQ ID NO: 2310 - DNA, 1257 bp, Aureobasidium pullulans; identical to SEQ ID NO: 1923

SEQ ID NO: 2311 - DNA, 1089 bp, Aureobasidium pullulans
atgcaccttcccagcatcactgcggctttggccctgattggtctcagcgctgctacccctactgagtacagcacttcttcctcctcttccaaggatcaaggactcgctcaagcctggacctccaaaggacgccaatacatcggcacagccttgaccatccgcgacgacccgatcgaacaaggcatcatccaagcccgcaacgaatttaactccatcacccccgaaaacgccatgaaatgggagtccaccgagcccagccgcaacaactttacctttgccggagcagatgccattatcgatttcgcagacaagtacaagaaggaagtcagatgccacactctggtttggcattctcagttgcccgcctgggtcagcgaaggcaacttcgacaacaagactttgatttccatcatggagaatcatatcaagaaacttgctgggcggtacaagaacaagtgcactcattgggatgttgttaacgaagcactcgaagaagacggcacctacagaaaatcagtcttctacaacaccatcggtgaagccttcatccccatcgccttccgcttggcttccaaatacgcaggctcccacacaaaactctactacaacgactacaacctcgaatacaacaacaacaaaaccctcggcgccttgcgcattctgaaactcattcagtcttatggcgtacaaatcgacggtgtgggtttgcaggcgcatttgacttctgaagctacggcgagcagtggtggtggtgttacccctgatacgaatactttgaccaaggtgttgaaggggtttacggatttgggcgtggaggtcgcgtataccgagttggatgtgaggtttaccgtccccgtgacggaagcgaaattgaaagtgcaggcggatgcttatgctagggttgtgcaatcttgcattaacatcaagaagtgtgtcggtatcaccatttggggtgtttctgacaagtattcttggatcccgggggttttcaagacggaaggtgcggcgttgctttgggatgagcagtttaacaagaagccggcttattattcagtcctcaagactatccaggcatggcgcaagacttga

SEQ ID NO: 2312 - DNA, 657 bp, Aureobasidium pullulans
atgccttcgttcaagagtgttctccttgtcactgcatacgcagtccttgctttggctgctccagccagcgaaatcgaaaagcgcagtgagaccatcactaccaaccaagttggcacatacggtggctactacttttccaactacgtcgagactggatcagactccttgactcttggaactggtacctactctctgaagtggaccagcgccaacactgatgtcgtggctggtatcggctggcaaactggtgctgctcgcaccatcaagtacactggatccatcaatgctggtggtgacagtctgatcgcgctttacggatggaccaccggaccccttgtcgagtactatgtcattgagacctacggaacatacaaccccggcagtgctggaactcatctaggcactgtcacttcggatggcggtgtctacgacatctacgagaccactcgtaccaatgctccttccatccaggggactgctacgttccaccagtacctctcggtccgtcagagcaagcgcaccagtggtaccatcactttccagaaccacatcaacgcttggaagtctctcggcttgaaccttggtacctacaactaccagatcatggcaaccgagggctaccagagcagcggttcttcctcaatcaccttgcagtag

SEQ ID NO: 2313 - DNA, 2028 bp, Aureobasidium pullulans; identical to SEQ ID NO: 1926

SEQ ID NO: 2314 - DNA, 723 bp, Aureobasidium pullulans
atgcttctcaacactctccttctcaccgttgctgcctttggctcttccgcaaacgccgccgcagctgcctatgctcagtgcggaggtcaaggcttcactggcgacaagacctgtgtctctggctacacttgcgtagccaacggcgtatactacagccaatgcctgcccgcaagcaacaccgccaagcccgcatctacttcaaagacctccgcggctcctgtttcgacctcgaaggccgccagcggtggtggtagcagtggcacaacctacaaggcctccttcactcaatacggcagcggtgatactttcggaagtggcaactgcaacaccaagaccaccgcttgtggtttctacacttctcccggttattcagctgcactctcccaaaacgcctttggcgtaggccctggcgccggcgcaggcccagcttgcggaacctgctggaaattgaccgcccaaaccgacagttccggccacgccctttccaacgctggaaacaccatcgtcgttcaaatcaccaacctctgccctgcagatggaaaccctctgtgctcgcagaatggcttgacaggaacaaaccaatacggcgccaacttgaactttgatctgtgcttgaacagtggtgccaatactgctttgtttggaaactctggtgttgggttggctgtgggaactgctgtgcaggtctcttgctcgcaatggtctggtactgttgttcactaa

SEQ ID NO: 2315 - DNA, 1596 bp, Aureobasidium pullulans
atgaggatctcatccgccatctctgccttgaccgcattggtctcggttaccagtgctgctgcaaccacaaaggctgtttcagcctcggtcacctttgacaataacagaagattcttgttcgacaccgatggcagacagattgatgcctatggttcaaaggtcaacaacttcaacggcaaatactacctctacggcaattcgttctcggagactggcgtcgcttatggcataaagtcgtactcttcaagcgatcttcaatcatggcaatatgaaggactcctcttcgatcctgccaacaagaacaacccctgcgctgggtctggcggttgtggacgccctcacatcgtgtataacccaaacaagaagtcatatgttctctgggccaatgctggagaagtcggctacgtggttgcaacatcaacatcgcctactggtccatttgtcttctccgccgcgagagctctcatcgaccctgcctttgacggtctgcagccagccgacttcaccgtcgaagtcatcaacggtactggttacattgtcttctcggctttgaacttcagaagccccaatgctggcaatgtctggcctccaatcttccagaacctacatgtcagcaagttgacagacgacttcatgaacacaaccagagtcagctacccggtcagctcggctgccggagatctgattgacaatgaagccgagtcgcctgatattttcaaggtcggaaacaccttctatgttgctgcttcaaatacctgcggttactgcaatggctcaatcgcgctgctgtatcgctcaaactctatccaaggtccatggactcgccaaatcctcgaaggatactcttgcaatggtcaagtcgaaggcgttctccctctgacaaatcctgcaaacggtgctgtaaccaatgtctggcactcaacttctgttcctggaggtcctcgtactggattcggcggccacatcttccaacccctgactttcaacgccgacggcagcgcaaagaacctcgactgctcgaccactgcatccttccccgtcaccttcaccaagggcaacggcacagcaccagcaggaaatgcgacaaaggccgttgataccacaccagcccttgctgtatacaaccccgtctgcgattccgactctttcatcttgtaccaaacctggacagcatcgaaagccggaaccatcaagagcgtctccctgaacgtcgctcgtggctcgcagaccgtacctctcacccttaccgtctttaagcttaactccttgaacgatctcttcacacctggtttcaagtggaccgctctcggcaccgctgccttcaacgcaaaccagacaacctacactttcgacaccgtaaccgtacccgttactaccaattccacagtgaccaagggtgaattgttgggtttgtcgatctcgggtgctgattattcgccttggtgtcatttggagtattcgactactcaagattgtggattcaagttgtaccagcagggcaacgggcagtactcttggagaggactgcagggaaagaacccgccagtttatgagaggcagggcaagagtgtcaagtttttcgcgacgtacgcttga

SEQ ID NO: 2316 - DNA, 1263 bp, Aureobasidium pullulans; identical to SEQ ID NO: 1929

SEQ ID NO: 2317 - DNA, 1971 bp, Aureobasidium pullulans; identical to SEQ ID NO: 1930

SEQ ID NO: 2318 - DNA, 2187 bp, Aureobasidium pullulans; identical to SEQ ID NO: 1931

SEQ ID NO: 2319 - DNA, 1755 bp, Aureobasidium pullulans
atgtggtcaagatcatcaaaaagtcttctcgcgttgtccatcgccggcccagcgctgagcacacctattctgcctaggtacactaactcgaccagttctggcgttgtatgcaatggcactttctcccgcatatcagctcagacttgggtggacggcatgaatccaggatggaacttgggcaacactctggatggcatacctgacgaaggagattggggtaatccgcccgtggtaccctcgactttcgacgatgtgaagcaagctggcttcaagggcattcgacttccagtaacttgggcataccattttaccactgaagctcctgattatgatgtcgacccagcctggctccaacgagtatctgacgtcgtcgacatggttactgagcgtgacatgtatgtgcttgtcaacgttcatcacgactcatgggtatgggccgatgtcaccaaggctggggccaactatactcaaatagaggaaaaattctatcgcctttggtatcaaattggtactaagctggcatgcaagtcgagcttattggcttacgagcccatcaacgaaccacctggcacgacagctgcacatgctgccgagctcaaaaagcttgaagacttgttcttgaaggctatcaccgatgccggtggtttcaacccggaccgtgtggtaactctcaatggtctccaggaaaacagtgatctgacttctcaatatttcgttcgtccaaccaacatcaccaatccttgggctattcagtatcactactattcgccataccctttcatcttctctgcttggggtagcactatctggggttctgaggccgacaaagctgctctcgaagcagacatcgccaacattcgtaacaacttcaccgacgtgccgttgataattggtgaatgggctgcgtctccagtcgctaccgaaactgccgctcgctggagatactttgacttctttgtccgcacagctgccaagtataataccacgactgtactttgggacaatggcgcagacttcttggaccgcgcaaatcatgtctggcgtgatcagactgcaatcgacatttatatgtctgctgtcgcgggtgaagccaatgcacttcccgacagtaccactgatccgagcgctgccacccagttcaccagtgccgatctcttcgttcgtgtcggtcagaacgtgtcctcgcagacactaccttacatcttgccttccaatatctcgctgatttccatctcgggagccgatggcacagcactgactaaaggtagcgactactctgtttctggcgacgacatcacgttctcggcttctttcctgcgcacatactttacttcagcctccagtcctggctctgtcgccaatttgaccctcgacttttccagcggtgctgacttgaccttgaaccttgtcctctgggatacccccgtgttgagcagtacttcaagctcagtcgcagcagccaatggttccagcatttccataccaatccaatggaagggcatcaacaagcccgccactgtcaaagccgtgactgccaatggtacatacttggtcgacgacttcacctcctactacgggcctctacagaatgctagaacaacctacaactcgcagtggaactgggatactgacaatgtgatcattacggctgctgctgttagtgctgtacaagctttgggtcaagatgtcatcttcacgttcgagttttatcccagggtgcctggtaatgctgtcaactacacattgactgtctga

SEQ ID NO: 2320 - DNA, 1173 bp, Aureobasidium pullulans
atggtgaccatcaagtctctcatctcagtcttctccctcggtctgctgggcaccgctcaagcctacagtcgaggcgagtgccaataccctacgcaaaatcctcttcaaggttgtcctcaaggaactcttctggtcggtgcaggacagaaattcacttccatccaatccgctgtcctcagcattcccaacaacacggtaccctactatatcctcattcttcctggaaactacaccgaacaagtcaacgtcacacgccctggccctcttaccctgctggcccagaccaggtatcccaacgacaataccaggaactcagtcaacgtgatctggcacaatgctaccggaacagcaagcactggaagctacgacaacgcctacacttccaccctcaccatcgctccgactttcaacagtagttcgaccggcagtggaccaactggcaatcaagtgcccgcaggaacacccttcggcaacactgatttccgcgcttacaacttgaacttcatcaacgactatctaccctactccgccggcccttccctagctctaagcgtcagctacgcaaacgccggattctactactgtggattctacagctaccaagataccgtatatatcggcaagttgggaaatgcatacatgtacaactccaccgtcgcgggccaaacggacttcctctatggcttcggcaccctatggattcaatcttcgcttctgtctctccgttcctgcggcggtggcataacggcttggaaaggcacgaatacaaccttcgtgaaccactatggcgtctatatccacgactccttcgtccgcgccgcaaactcctctctgaacattgtgggcaagtgcgcgctaggcagaccatggaatgcactgcacaggagtatattcgcaaatacctacctcgacgactcgattgaacctagtggatacatcaaatggagtgccactgatccaagagtcaatggcaacactacaatggcggagtacaaggattatggacccggatggaatgcaacaggcagagcggcaggaaatgttaccattgtcatgacggatgcggagtatgctccttacagcactttggaaaaagtgttccaggagccttttacgggcaaatttgggaatacgaaatggattgataggaagcctgttgtgcatgggaattga

SEQ ID NO: 2321 - DNA, 1338 bp, Aureobasidium pullulans
atgaggcttttttcttgccttcttgccgccgccacggccatcacctctgctgtcgcctacgacattcctgacggtgcatctatctctgtcccatggaggcatacaggacgtcctggattcggctggggcaaccaaaaagacaaatggggtaacaagatcgaggacgaccgccgtaagatcactattcgtgcgtctgaagacgacaccgacgacatctcagcagatttcgtttgggctctggaacaagcacagaacggaggattggtacatctcgaggaaggtaagacctacatcattggcaagaagatcgatcttcctgtgctcaatgatgtatatgtcaagcttgatggtaccctgaagttcaccgatgacgttgcgtattggcaaagcaactacttctactacccttttcaaaagagtatcactttcatggtctggagtggcaaagacatccgcatctacggcaagggaacgatggacggcaatggtcaagcatggtacaatggctttgctggtcgcgagatcttggactccaccaacacatactaccgtcccattctcttcttgaccgacaatgccaccaatgttgacgttgagggtatcaccttcttgaacagtccctgctggaccactttccttgttcgcaccaaggacgtctcttttgacaatgtatacattgaggctttcagcaacaacgcctccgcgctccctaagaacactgatggcttcgactcgctcaacgttgatggtctgactgtcacaaatacacgtgtcaatgtcggcgatgactgcttctcgcctaaacccaacaccaccaacatatacgttgagaatctttggtgcaacggaacacatggtgtctccatgggctcgattggccaatatcctggcgtcaaggactacatctcaaacgcctaccttaagaacatcaccctcctgaacggccaaaacggcgccagactgaaggcctgggcaggtccaacagcaggttacggctacatcgacaacatcacttacgaaaacgtgcacattgagaacaccgacgcacctatcgtcctcgatcagtgttacttcaacatcaacgagaccacctgtgctgcctacccttccaacgtcaatatcaccaacatcaaattcatcaactttactggttcatcatcgggcaaggatggtcgtgttgtcgcggacttgacttgttcgcccggtgctacttgcagtgagatccttctcgaggatatcaacctgactagtcctaatggtacggcggagattgtgtgtaacaatatccagggagatattggagttgattgtatctcggctgcggacgccgatgattga

SEQ ID NO: 2322 - DNA, 1035 bp, Aureobasidium pullulans
atgccatcaaacactctaagactactttgtgctttggcgcttacttcttgggcatctgctagccctgcagcgcttcctcgccaactgacctatcgcgactctgtaaactaccaattcaacccaacttctcgtaaccttgcagtctactatggcaaggcgcaaaacactgacagcccttccttgtacgatttgtgtaccaacagtaatgttgacatgatcgtcatgggattcgtacgccagctcaatggacctactgcccttccatcattcggatttaccagatattgcaagactccagccacagtcacggacaagactagagtttcttgtccggatatggcggccaacatcacgttctgtcagagtatgggcaagaaagtgctcatcagtctgggtggatcggtcagcaacttgactcttgacagtgtcagtgacgctcatgaagccgcgagcattctttggaacgtgtttggcgctggagccaactcaacagcgctgagaccatttggaaatgtagccatcgatggctttgatttcgacttcgagtctggggctgacacaacttacatggataccctggcatcttccctacagtcttacttcagatcgtcatcgccagaacgctatatcagtgcagctccattgtgcgccaacaacacagtcctgccctacggtctctacgccaacgccaacttcgtctggcctcgcttctacaacgcaaaagcatgctgctttggtagcaaaggtttcaacaagtccgtcagcacctggtacaactacctgaactcgatcaacagcgacttgggcccaacctacccacgagtctatcttggtggactgagcttcaataacagtaactctgggtttatggagccggacgcttttgtcaatgctactttcactgggaggaggctcgttcagagcaatttcggtggtgtcagtttatgggaaggtacggatgggttggtcaccaagaacgctcaaggcagagacttcttgaacgtcactaaggctggtcttcttagagatatttga

SEQ ID NO: 2323 - DNA, 2403 bp, Aureobasidium pullulans
atgtacaacctgaagtctagcgtcgcggctcttgtcgtccttggacagggcattgctgctcaaaactcgtcttgggaccattctctttacactagcagtccaggtgtattccctagcccaaacacaactggtatcggctgggaagatgctcttcagaaagcaaagtcatgggtcgcaaacttgaccttggaagagaaggtcggactcttgactggtgaacctaagggaccttgcattggtaacattgcacctattccgcgtgtaggattccctggtctctgcttgcaggatggacccttgtcgattagacaggccacttttgcttcggtcttcccatcaggcctcactgcagcttcgtcctgggaccgtgacttaatccgtcaaagaggcgagtatcttggagccgagttcagagacaagggagcccatgtagctctcgcaccagtggctggacctcttggtagatcggctgatgctggtcgcggatgggaaggattctctccggacccatatcttaccggtgtggcaatggaggagaccattgaagccttgcaggaggctggtgttcaggcttgcgcaaagcactggattggtaacgagcaggagactcagagaaaccccactctctcgcccacgaacaagacgatcgaggccgtctctgcaaacatcgatgataggactatgcacgagctctacatgtggcccttcgccaacgctgtcaaggctggtgtttcttcaatgatgtgttcttacaatcgtctcaactcttcatatgcctgtcaaaacagcaaagctctcaacggtcttctgaaggaagagcttggcttccaaggctatgtcatgtctgactggggtgctacccatgcaggtgtcgccaacatcgaagccggtatggatatggacatgcctggaacaattgctttcttccaagccggaacttcttactacggacaaaacctcaccaacgccgttaacaatggaactgtgcctgaatcaagaattgacgatgcagctcacagaatcatgactccctacttctttttgggtcaagatcaagacttccctctcattgatccttcctccggtcccatcaacattctcggtgttcagccttacctcgactctttccagtatggagaagcaaatgttgatgttcgtgccaaccacgcagatcttattagaaagcttggatcggcaggtaccatcctcttgaagaacaccaacaacgtcttgccactcaacaagccaaagaacattgcggtctttggcaatgacgctggtgacccggagaacggtctgtactctctttctttgactggaaatggcgattatgagtacggtcatcttgccgttggtggcggctcaggtactggtcgtcttacatatctgtcgactcctctggacgctctcaaggtccgtgccaagcaggatggtaccaacttgcagtggatcctcaacaacactcttctcgcaaacgccaacaccgctgccggatttggtgcaatttaccctcagcccgacacctgcatcgtcacgatcaagacctgggctgctgaaggcaacgacaaggctaacttgcttcctgactacaacggtactcaagttgttgaaaatgtcgccgcttggtgcaacaacaccatcgttgtgactcacacttccggacccattgtcatgccttgggctgatcaccctaacgtcactgccatcctcgccgcccatttcgctggccaggagagtggtaacagtttggtagatgtcttgtacggcgagtacaaccccagtggaaagcttccgtacaccatcgcctacaacgagtcggactatgctttcgctcgcatcaccaactccaccgagctgagactgaccgaggaccccaacgcatggcaggctgacttcaccgagggtctcctgatcgactaccgccactacgattactacaatctttccgtacagtacgagttcggatacggtctttcgtacaccaacttcagcatgtccgacgtcaaggttcaacgtcttgctccccagaacttgactgctcgtcccaccaatgctggcaccatgcccggtggcaaccccactctctatgataccctctacgagatcaccgtcaaggtcaagaacactggatccattgctggagacgcagttcctcagctctacctctctcaacctgtcaacccctctttcggtctcactcccgtccaagtccttagaggcttcgagaaggttgcactcggagccgggcagagcagaacagtgactttccctctccagcgccgtgatctcagtttctgggatgctgttcagcagcagtggatcattccttccggtaactttggtgtcagagctggattcagcagcagagatattcaggctacttctggcttcagtgctctgtaa

SEQ ID NO: 2324 - DNA, 1680 bp, Aureobasidium pullulans
atgcgtttttccctgcttcagattggtgccgcacttggcctggctgccagtgttggtgcttcttcatcgcccggccgcaatgtctttgaacgcgccgagaagttgacggcaaagtcacctattattgagaagagagagattggcaagcccttcgagcaccctagacttcagaagagagcttcgccctacctgaacaatgccactgagaagttctgggtcaacggatcagctattcccgatgtcaagttcgatgtaggcgagtcctacgctggtctcctgcccatcagtggtgctgccaatgagactcgcgagctttttttctggttcttcccctcgacaaaccccaacgccaccgaagaaatcgccatctggttcaacggtggtccaggttgcagttccctcagtggtctgttgacggagaacggccccttcacttgggaggctggaactctggagcccgtacagaacccctacacctgggtgaacttgaccaacatgctttgggtcgagcaacccgtcggtgttggcttctctcagggtgtacccaacatcaccaatgagatcgagctcggtcttgaattcgccggcttctacaagcagttcgttgacgcctttggtctccacaactggaaggtctacttgactggcgaatcttacgctggtttctacgttccctacatcgccgacgctttcatctccctcgcagacactgtctactacaaccttcagggtatcgccatcaacgaccccatcatcggagacgagacggcccagcagcaggctgtcattgttccttacgtcgactactgggagaatgtcatctacctcaacgagactttcttgaagcagattcacgatcgcgccgaccagtgcaactacacgtcatacttggagaagtacctcactttccctcctcctcaggagcctttccctctcctccccgatccctatgagtccgacacctacgcatgcgacatgttcgacacggtgtatgaggccattctcctggtcaacccctgcttcaacatctaccacatcactgagacctgccctcacccatggtcagtccttggtggtgtcaacaccggcgactacattccctctggagaagtcgtctacttcaaccgtaccgatgttcagaaggccatcaacgcgcctgttggtaccaactggcaacagtgcaccaacgtcaacgtcttcggtggagccaccaacaaccgctcgctcagcgacaccagcaagggccccgctctcgatggcactctccagcgcgttattgagtacaccaacaacaccatcatcggttctggtaacctcgacatgctcctctccaccaacggtacccttgttgccattcaaggtgttgagtggaacggaaagagaggtcttcaggaataccccggcaaagaattcatcgttccttaccaccccgagtacaacggcggtgccctctccggagccggcaaggtcggatactacggaagcgaaagaggtcttaccttctacaccgctcaactcgccggtcacgaacttcctggctacgctcctggtgctgcttaccgctctattgagctcctccttggacgtattgactctctcgcctatgacggtgacttcaccactcaaactggcaacttcactggcaatggtacaatctatgcccagcagcagttgttttag

SEQ ID NO: 2325 - DNA, 1002 bp, Aureobasidium pullulans
atgaaggtccttctcacaggtggctctggctttgtcgcccaacattgtctcagattgctcttgaagcatggccacgacgtcgtcactacagtcagatcagcggagaaaggacaacaactactttctgcgaacccaggactgccgactacgaaactatcgtatgtcatcgtcaaagatatcgccgaacccaatgcattcgacaaagcaatcatttcctctcctcccttcgcagccgtccttcatacagcaagtcctttccactatgcagccacagacttcgagaatgatatgcttaagcctgctgtcaacggcactttgaacatcctcaatgccatcaaagcacacgctcctgaaatcaagaaagtggttgttacgagctccttcgctgctattatcaacatgcaatctccgccagaggtgtatgatgagagcatgtggaaccccatctcctgggagcaagcgcagaccaatggtgccacggcctatgtaggcagcaagaagttcgccgaaaaggcagcttgggatttcatggctgttgagaaaccagggtttgcgttggctactgttaacccagtattggtgtttggacctattatggagggcagtttgacctcgcttaatgcggtgaatacgtccaatgttgttttcagagatatgatacagggaaggatgaaagatggcattaccaacgggtcattctcatgggtggatgtccgggatgtggctgctatgcatgttgctgcacttgagaagtcggaagccgatggacagcgcttcatcgctgccgccggaagatattcaaacagcgagattgcttcaatcatcaagaagcatttcccaagtctgcaggataagcttccggagcacatcgaacttgagtcgagcaaggctgggtatggaatcgacaattccagtgcagagaaaattttgggggtcaaattcagagatttggcgcacgctgtggttgatactgtagactcgcttctcaaggtggaagcttag

SEQ ID NO: 2326 - DNA, 987 bp, Aureobasidium pullulans
atgatcatcaaacctctcttgtcactggtcggcctcaccgcaccctccaagaacatatgggcgaacacaacgaatgtcattgcattcggagactcttactcgtatgttctgggcacatcaggacgtcagaactacagtttcattggagattaccaaaatctcggattttcaagccaaacacttttgaacaacaagattgtccaaagtcaaaccagcacagcggaaggtggtccgaactggcttgagcacctcacaggctgtggagtcaatgctggcaccacctcacccttggactgcaacattcagctttgggacttcgcattcgctggggcggatattggaacacagtacactcctcgacacaagtacttcacagttccgcttgtgaaccaaactcaacagttccttacatacgcccaaccagctcttgccaacatcactactcctgaatctaccttggcttctttctggatcggcacaaacgacatcttcgacactgccacctccaccgtccctttcaagaccgtctacgcgaacatgatcgctactctcttcgcctcgatgcaaaccatccatgacgctggctaccgcaacttcctcgtcatgaacctagctcctctcgacaagactcccaagaacgtcctcaagcgccgcccactaccaaacaccaacatggttaaccaattcaactccatcctcgccaaccaggccgccgcattccagaagaagaacgcagactccaatgttgcccttttcgacaccaacaccttcctcaacggtgtcctgaagaaccccggacagtatggtatcaagaacactaccggattttgcgcagcttggaaccagcctaatgttgtcgccaacgctggacaatatggttgtcagcccatggatgagtacttctggttcaacactgcgcatttgaccacgcatgttcacgagatcttggcaacagaggtgcagaagttcttgagtggaagctcatga

SEQ ID NO: 2327 - DNA, 1380 bp, Aureobasidium pullulans
atgttgttccaacctctcattgctgcgactcttttgagcgccattacagccgttgcttcaccgacatggtctgcacaacaagagtataccaagtctttaccaaagagtgtctccaagcatcaaggaactcgacccaagaccgacatttctcccaagaagcctttcaagccattcccctcttctccttcccggaacaaggtctgctatgttagctcccacaacgacggcgtaaccgacgactcggagtacatcctttctgccatcaacaagtgcaacaatggtggccacgtcatcttttctcaaggccagaaatacgtgattggcacagcgttgaacctgacaaacctcaaccacatcgaccttgatatccaaggttatgttcaattcaccaacgacaccgattattggcaagcgaatgcgttcaagcaggtcttccaaaacgccacgaccttcttccagcttggcggcaacgacgtcaacgtttacggcggcggcttcctcgacggcaacggccaagtttggtatgatctgtatgcccagaacatctacgttctgagacctattctcttcggtgctgttggtctgcacaactcaaccatccagaacttgaacttccgctacagccctcagtactacaattgggttgccaacagcaccaacgtcctgttctcgaacatctccatctctggatcgagtcagagcaagaacccggctaagaatactgatggatgggacacttaccgtagcgacaacatcgttatccagaactcggtcatcaacaatggcgacgattgtgtctctttcaagcctaacagcaccaacatcctggttcaaggcttacaatgcaacggcagccacggcatcagtgttggctctttgggacaataccctaccgagaccgacatcgtcgagaacgtcctcgtctacaacatctccatgtccaacgcaagcgatggtgctcgcatcaaggtctggcctggctcacccgccgctctttccggcgacctccaaggcggtggcggcaagggccgtgtcaacaacataacttacgacaccatgtccatcaacaacgtcgactatgctattgaggtcacccagtgctacggccagaagaacctcaccgcttgcaacgagttcccttccaagttgaccatctccaacatcgtcatgaagaatattcatggcaccaccagctccaagtacaatcccatctctggatatgttgtctgcagtagcccaagcgtttgcaccaacatcaagctgtcagacatcaacgtcagcagcccgaacggcacggtgaacgagttttcttgcggcgacgtggatgagagtcttctgcagggcattcagtgcactaccatcaacaagggttacaactag

SEQ ID NO: 2328 - DNA, 3123 bp, Aureobasidium pullulans; identical to SEQ ID NO: 1941

SEQ ID NO: 2329 - DNA, 1650 bp, Aureobasidium pullulans; identical to SEQ ID NO: 1942

SEQ ID NO: 2330 - DNA, 1236 bp, Aureobasidium pullulans; identical to SEQ ID NO: 1943

SEQ ID NO: 2331 - DNA, 1311 bp, Aureobasidium pullulans
atgggataccgttcgctcccggcatctccagagcaaacactcgatatgttctcctctctgttatccgtcgtcacctcagcattgctggccaccactgctgtggcatggcccaacgtaccctcagctccattcgtccaaaacgtgaccgtcttctctcccccagccaactggccaaataaaggtggcagctatgcccgctccgtcctcctcaaccagaactgcgaaaagggaaatcctaccatcctcgccaccgccgcctatcaaccaccagacggtcagtatctcatcatccacaagagcacagactttggtgccacttggtcggagctctccaaggcatacttcaatggcaatgctagtttgtctggcggtatcattcttcagcctttcttgtatgagcttgctcagccgtttggcaagtatcagcctggtacgatcttgttgtctgcaaattatatcccgggagacttttctagtaccaatattcagttgtatgctagtacggacaagggtgcttcttgggagtatgtctccaccgtagcggccggtggtccgccaaacacagataacggtgcgccgtgtgtatgggagccctttcttctggcctacagcaaccaactcaacgtatactactccgatcagcgcgatcccgcatacggtcagaagctcgctcatcaatccagtggtgacctcgtctcctggggcgatgtcatcaacgatgttgcctatgcaaactacacacaaagacccggaatgattaccgtagcacaaatcggcaatggaaagtggatgtgctcttacgaagtcgggctctggacagatcccgttactggcagcaacgacagtgcaccctatgctacccactacaagattgcagactcgcctctcgattttggcccagtcggcgacagcatcttgaagactcctgagggcatctccagtgcaggtccgtataccgtttggactccagctggtggcccttctggcacaatcgttgtgagcgattcgtcttacgatcagttcttcctcaacacacagaacggcgctcctggtgcgtggaagaatgtcagcagccaaggtcatggtgttggctataccagatccctgtcggtgttgtcagggaatggtggaaagactgttcaggtcctcaatggtggcatgtatggatcgaacatgacgctgtttagtgccggcgacttcatcgttcctggaccggccggtcatggtcctggtgcttctggcttcccagcctgcaatcataacagcggcggatacggtcacggttggggatggggaagcccttggtggtaa

SEQ ID NO: 2332 - DNA, 993 bp, Aureobasidium pullulans
atgttcttctcaaagctgggacttttggtcctcagtggtgcatctgctgttctcggtgcttcctactccaaccctctggagcccaaggatggcggtgatccttccatcgtctggtacgatggctactggtactttactgcaaccaactaccgcgacatcagcgtcagacgcgcaacaacgctcgatggactcaagactgctctgccaaagacagtatgggcacctagtgcagaattccctactcgccaatgcaacatctgggcaccagagctgcacatcgtagacggacaatggcacatctacttctctgccggtggctgcggcgatggctcgatccaacaatcccaagtccttcgcggtggcgagtctccctgggacaatttcgactttcacggcactgtcaacgcacccgcctggtcaatcgacggcacacccctaaccataaacggtcaaaactacttcgtctactcctgcttccgctccgacactggcgaaaacctacaatccctctgcatcggcaaaaacagcgatattctcaccatcggcgaagaacacctcctcgcctccccaaccgaagcctgggaacgcaatggccaaatgcccgttaacgaaggtccattcgccctttacacgaagaaccgcacattcctctcctactctggctctttctgctgggatccttcgtattcgctcggtttactcgaatatgtaggcggtgatccattggagcaaagtagttgggtaaaaactggtccgcatttcagccaggcgaatggcatgtatagtactggacataacagtttcttcgccagtcctgatggtacggagacatggatggcgtatcattcttctcctaaccctgctgggagttgtggggataggtattcgaatgcgaagaagattgatttcgaggctgatggatttccgatccttggcgctcctgttgctgaaggggaggttttggctggtcctgctggtgagccggctgcttag

SEQ ID NO: 2333 - DNA, 1572 bp, Aureobasidium pullulans; identical to SEQ ID NO: 1946

SEQ ID NO: 2334 - DNA, 1014 bp, Aureobasidium pullulans
atgtcttcctgcagggccctccgtattctggggcagagtttatctttgctcgctattctatctcctctgtcagtcgccgccgcgtccaaggatgagttcaagacgatgtgtgccgcctttggcgactcgtctgcagcccagttcgctggcgcaagttccgacactggcaaatacctgtatggctcgaaccagtggggttgggacgacagcggtgctcagtgcatgactgtcggactggacgactctgacgatgctgcttcgttcaatgtaacatggtcgtggacggaacgcgacgtctgggtccactcgtaccccaatgtcggtcttgagtctgtacagctgcccagcagactggacaacgtcaagtccttcaacgtcagcgccgcctgggacatgtacccttcagcccaacccgatgccgtcaacaagaccgaagctctcatggccatcggcaccaaggccgatattgcgctcgacatgttcatcgacagcaacaacgtcactgccatgaacgcttccgccgccgctttcgaagtcatggtctggtcggctgtctggggtggtgtcgcccccatcggataccagaccttcaaccgcgccgacgctcccaagtacactcttgctggaatcgaatacgctctttactctggcttcaaccagcagggccagaagcaggctgtcttctcttgggtccctgctgagaaccagaacggcatcgatgccaacctctgggagcttgtcacctaccttgtcaacgccggtaaccttaccgccgacatgtacctcggtctgatccagttcggcactgagactgtccacgccactcagaatgtcactttcgagatgcaaaaggctcagatggacctcgcggttgtcagtcaaaagcccaccaccaccaagggatctcctcccgccaccgctggcgcatccaagggtgctgcattccacgtcgcaccgactggattcgccctccccgcagctgccatgggcattgctgctgccgtccttctctaa

SEQ ID NO: 2335 - DNA, 1623 bp, Aureobasidium pullulans
atgaagggtatcgcaggcctcacactcctgccgctgctggcagctgcaaagcctgtcttcaaggcagacaccttgagccaccagagcatcgacaacgatgccgctcctctcatctcatctgtcgatgctgagaccatccccgactcatacttgattgctttcaaggaccacgtcgaccaccgtgacgccgccgctcaccacaactgggtgcaggacatccacgagtcgacccttaacaccaagctcgagctccgcaagagatcgcaggctccctttgtcgacactgtctttgacggtctcaagcacacatacaacatggccggcctcaagggctactcaggtcactttgacgaggatgtcattgacaagatccgcaagcaccccgatgttgcctttgtcgagaaggaccaaattatgcacactcttgccaagtccgaggaccccgccgtcgagaagggcgctccctggggtcttgctcgtatctcgcaccgcgacagcttgacctttggcacattcaacaagtacctctactcatctgacggtggtgagggcgttgatgtctacgttattgacaccggcaccaatgttgaccacgtcgacttcgagggccgtgccaagtggggcaagaccatcccccagggtgacgaagacaaggacggcaacggccacggcactcactgctctggtaccgtcgctggcaagaagtacggtgttgccaagaaggcccacgtcaaggccgtcaaggtcctccgctccaacggctctggctccatgtccgacgttgtcaagggtgtcgagtatgctgctgagtcccacattgaggaggtcgagaaggccaagaagggcaagagaaagggcttcaagggcagcactgccaacatgagtctgggtggtggcaagtctgctctcctcgaccaggctgttaacgctgctgtcgatgccggtattcactttgctgttgctgccggtaacgacaacgccgactcttgcagatactctcccgccgccgccgagaaggccgtcaccgtcggtgcctccactcttgctgacgagcgtgcttacttctccaacttcggcaagtgcaacgacatcttcgcccctggcctcaacatcctttcgacctggatcggcagtgagactgctaccaacgtcatctccggtacctcgatggcctctccccacatcgctggccttctcgcctaccttctctccctccagccctccaagaactctgcctacgctgtcgctgagatcacccccaagaagctgaaggccgaccttctgtccatcgccactgtcggtgctcttgaggatgttccctcagacactgccaacatcctcgcctggaacggtggtggttccgccaactacaccgaggtcatctccgctggtggctacaaggtcaagaactctcagcgcgagtacggtcttgaggagctcaaggctgtcaccaagaccgacttcgcccacgatgcctacaagaaggttcaggagatggacgcttcgaccatccgtgaagacatgagagagtcgtttgaggccgctcgcaaggagattggcagactcactgccaagctcgagtctgagattgatgagttcctcgtcaactccaagatggagtaa

SEQ ID NO: 2336 - DNA, 972 bp, Aureobasidium pullulans
atgaagtttgcctcagctgttcttttggccctcagtgctgtttctactgcactcgcggcttcattcaccaaccctttgagagccaaagatggatccgaccctttcatcgtgtactctggcgacggatactactacctcttgacgactgaatggaccaacattcaagtcacaagatccaagactcttggtggtctcaagactggcgagacgaaggttgtctggcaagacagcactgcctctcgttgttgcaacgtctgggcacccgaggtacactggattaacaacgcgtggtacatatactacagcgcttcgaacaaggatgatcttggtacccagcgcatccatgtgcttaagggcggatctgccatctttgatacatacacttacgctggccaactcttcaacgaatggagcatcgatggtaccgtccttcgcttctctgataagaactactttgtctactcctgccagcgcaccaacctccaatcactctgcattgctccaatgaactcaccaacctccgtcggaaccccaaagaccttgtcacaacccactcttgcatgggagaagattggcgagttccctgtcaacgaagggcctgctgcgctctatcatgggggaaagacgttcttgacatattcggcaagttactgctggactagctcttaccagctcggtcttttgacctacaagggtagtggagaccccactttgtcagcaagctggaccaaaagtggtcctgttttcagctctgccaacggaaactatggtaccggacacaacggattcttcaacagccccgatggaaaagaggtgtggaacgtttaccacgctactgccaactctgctggtgcatgtgatggaaacagatatactgaggctcaaagggtcgactggaactctgatggaagccccaacttcggcaaggctgtcaagctcggcaccactctcaatggcccctctggcgagtag

SEQ ID NO: 2337 - DNA, 678 bp, Aureobasidium pullulans
atgaagtccttcttcattgcctgcctcgctgctaccagcactcttgctgccccccttgctgttcctcagtttggtggtttccctagctttggtggtggcttcggcggcggctttggcggcagcaccaagaacgatgtcaccagcggtgtttgcaagcccgtgacctacatctttgcccgtggaaccacagagctcggtaatatgggctctactgttggtcctgccctcgagaaggccctcgagtcggcctttggtgccaacaatgttgctactcaaggagtaacttacccggctgatgtcgctggtgccatcagtggtgctctcaaccctggctctgctcagggcgctcgtactatggctagcttgacccagcaagccctgtctaagtgccccgacaccaaggtcatcctcgccggatactctcaaggtgccgaacaggttcacggcgctctccagaaccttcagaacggacaagttgctgtcgctcttaccttcggtgacccgctccagagaatgcctttcagaaacatcgactctggccgcaccaagatctactgcaacctcggcgacggtgtttgcgctggtgccttcatcatctctgctgctcacttgtcttacgccactcaggatgccactcctgccgctcagttcgccaagggtgtcattggcaacatctaa

SEQ ID NO: 2338 - DNA, 1140 bp, Aureobasidium pullulans
atgaagttggctacttctctgatcggagctttcgttgcacttgctcaagttgtcacctctgaagctgtggtgggcaaggccgacggttttgcatacggcgtcatcggcggtgcacatgcttcgcctgattaccctgccgacattgaagagctcaagtctatgcttaccgacgccacccctcgtgtgattgttctcaagaagacttacgactttactcaatccgagggcaccatcgtcggcaatgtttgcttgtcgtggggagatggccactcttgccagcagatcatccaagacgattgtggcgataccccgtcgatgactgcgaagtggtggaaggctcctactcaacctattgacgttgcctcccataagaccattctcggcgttggcaacaagggtgtcatcagaggcaagggcttgagattccgcggtggcgctagcaacatcatcgtgcagaacattcaagtgtctgatctcaacaacaagtatgtttggggaggcgatgccattggctttgatggagccgatttgatttgggttgaccatgttactacacacaaccctggccgccaacactacgtcttcggcttcaatcccagtactcgtgtcactctttcaaacaactacatcaacggcaactcaacatactctaccagctgcgacaactaccactactggaacttcgagatggttggcaccgacgaccagatcaccatgaagaacaactacatgtaccgcacggctggccgcgcacctgctctcagcggtggtactctccttcacgccgtcaacaacgtctggtccgacaacggtggccacttgcttgaaggtggtgactctaaagctcgtggtatcttcgaaggcaatgtgttcaccgacatcaattcgatggtcgcagactacgcaggtagattgttcggaactcctgctggaagtgagagcaagtgcaagtccgctctcggtcgctcttgccagaccaactcttacaagcagtcttcaggaagcttggactcttacaccgatacttccttctttggcgacttctctggtcttcacatcgctagtgctggctctgcggctcaagccgcttccagtgtacctcagaatgctggagctggtatcatcaatgtcggagcttag

SEQ ID NO: 2339 - DNA, 1113 bp, Aureobasidium pullulans
atgcacttctcttctctcgtcgcagccgccgccattggtggtgctgccatcgtttctgctgctcccgcagcctcgcccatcgacaagcgcgccactacctgcaccttctcaggctccagcggtgctgcctctgccacaaagtccaaggctgcttgcgccaccatcgttctcaacaacgttgctgttcctgccggcactaccctcgacctcactggattgaccactggcacccacgtcatcttcgagggtaccaccacctttggctacaaggagtgggaaggccccctcgtcagcgtctccggtacttcgatcaccgttactggtgcttccggcagtgtcctcgacggtgatggtgctcgctggtgggacggcaagggcagcaacggcggcaagaccaagcccaagttcttctacgcccacagcttgaccacttcttccatcaatggtcttacgatcaagaactcgcctgtccagaccttctccatcaacggagccaagaccttgaccatggacaagatcaccatcgatggctcagccggtgacagcctcggtcacaacaccgatgccttcgatatcggttcatcgaccggcgttactatcacgaatgctgttgttcacaaccaagatgactgtgttgctatcaactctggaacaagcatcaccttctccggtggttcctgcactggtggtcacggtctctccgtcggttctgtcggcggccgctctgacaacactgtcagcgacgtccacttcaccaacaacaaggtcatcaacagcgataatggactccgcatcaagactgtctccggtgcaaccggcaaggtgtcaaacgtcaactactcgggtaacaccctctccggcatcaggaaatacggtattgtcattgagcaggactacgagaacggctcccctaccggcaagcctaccaacggcgtcccaatcaccggcttgaccatgagcaagaacaccggtaccgtcaccagctccgccaccgatatctacatcctctgtgcctccggtgcctgctccggctggacctggtccggcaactccatcaccggtggcaagaagtccaccagctgctccaacgtccccagccctgcttcttgctag

SEQ ID NO: 2340 - DNA, 873 bp, Aureobasidium pullulans; identical to SEQ ID NO: 1953

SEQ ID NO: 2341 - DNA, 741 bp, Aureobasidium pullulans
atgaagtatcttgctgctgttctcggatgcgctactttggctgctgctcatggatatatcgacaatgctaccatcggaggcgatgaacatcagttctatcagccttacctcgacccttatatgaaccctgcggagaagcgtgtttcccgtcccgtccaaggcaacggtcctgtcacggacgttgatctgttagacatccagtgcggtggctactctgagggaggcattgtcggctcttctcccgctcctctcgaagctgcagcagaggctggctctaacgtcaccctccactggactctttggcccgacagccacttcggtcctaccattacttacatggccgcttgtcccgatgaaggttgcgaaaacttcatgcccaacaaaacagccgtctggttcaagatcgccgaacaaggccgcagtgcagacaagaagacctggggtaccgatcctctgaccaaacctggcaatgcaggatacacttacactatccctgagtgtatcaaagctggccactaccttgttcgccatgagctggtcgctttgcatgatgctgctcaatatcccggtcctcagttctatcctggttgtcatcagatcaaggttagtggtgagggaactactgtgcctaagagccttgttgcgttccctggtgcgtataaggggcaggatgtcatttatgatgccagcaaggcggagtacactgttcctggacctgcggttttccagtgtgctgcttag

SEQ ID NO: 2342 - DNA, 1956 bp, Aureobasidium pullulans
atgcatttccagaagctcagtgggctctgcctcttggcattcgcctcagtctcatgggccgatgccgtacctgagggtcgctacctatggggagctgaccgtatgggcaagatggtccgtcgagcaaccacaaaaacttcaaccacatcgaccaaagcgtctacctcttcagtcaaggcttcatctacctcttctgtcaaggcttcttcaacatcatcagcatcatcaaaaacctcttctgccactgtgatctctgtctcaagcagtacccctgcttcctcagtcagcagtgcatcgtcgtcaacttcgttggtggctgatgctgcgtgcaccaatggaccaaactctcgtcaatgctggagtggcggatacagcatcaagacagactttgatctgaagcatcctactacaggaaacactgttacctacaaccttgagatcactaacacaacatgcaacttcgatggcaatggcgacatgcagtgttacctcatcaacaatcagttccctggtcccaccattaccgctaactggggtgaccaaatcgtcgtcaatgtcaagaactctcttcagaacaacggcactggtattcattggcacggtatcagacagctcaacagcatgggatctgatggcgtcggcggtcttactgaatgccctattcctccaggcgccagcagaacatactcgttccaggcaactcagttcggtacttcctggtaccacagtcatcactcgtcgcagtatggtatgggaatcactggtcagatcgtgatcaacggtcctgcaagttccaactacgacattgaccttggccctctcccaatcaacgatctctactatggccttgcaaacaacgtgaacgaggttacactgcacaaccttcaacagaacctgcctcccccagatggttccaacattcttgtcaatggcaagggtaagagcgccaacggtggctcttactcacagatgaccctgaccccgggaaagagacaccgattgcgattgattaacacttctgttgataacgctatccgtgttaagcttgatggccataacttcactgtcatgtccgctgatttcatccccatcaagcctatcaccggtcagaactggcttctactcgctgtcggccagcgatacgatgtcgtcttcacagccagccagggttccggaaactacttcttccgcgccgaagtcgccactgactgcttcagtggaaacaccggaaagggacgtgccctcttcacctactcaggaacgaccgccgccgagcccaccgacagcaacgaggctgcccccaccaatggctgcactgagctcaacactgttccttactggactcaagctgttgaccagagccaatatgcctctcaagttcagaccctcaacactggtgttgcacccggtctcactaccaacgggcagaactttgcgctctggaacctggacacccgcgccatgatggtcaactgggacaaacctaccgctgaatatgtattcgagggtaacaccagctatcccgatccctacgccgtcctcgagatccccacagagggtacatggacctactggctgatccaaatgggccagcaaaacccacctcttcctcatcccatccatcttcacggtcacgacttcttcgtccttggctccggcgctggcgtattcgatgcctcaaccgctgtcctaaacttcgccaacccaccccgccgtgacacctccatccttcccggtcttggttggctcctaatctccttccctgccaataatcccggtatttggctcatgcattgccacattgcatggcatatctctgagggtcttggtgttcaattcattgaagccaaaaactctattgtcatgcccgacaagaccgccttcaactcacagtgtgatgcgtggaggtcttactccaagaacatgctttatcctcagatcgacagtggtctctag

SEQ ID NO: 2343 - DNA, 687 bp, Aureobasidium pullulans
atgtcttcaattctcgcttggacaaaggctgcttgccttcttcttcttgcatctgaagcttttgctagcccaattgagcttgagaagagagcggtatgcacagcttacactttgattgagacccgtggtactggcgaacctcagggaccatcgaacagcttcaagacgatggatgcagcaatcattgcccaactcgctggcggtaccgagtacaacactgtttaccctgcaagcattgaccaaaactcggccaagggtactgctgatatcatcaaccaaatcaccactggtttgaagtccaaccccaacagatgcttcatcctcgaaggatactctcaaggcgctgctgcaactgtcgatgccatgtcaaagatcaccggcgccaattttgatgcagtcaagggtgtcttcctcatcggcaaccctcatcacaagtcaggccttgcatgcaatgtcgactccaacggcggcacgactactaagaatgtcaatggacttaccgttcttgttggcagtatccctgcaaactgggttagcaagactttggacgtctgcgcatatggtgatggcgtttgtgacactgctcatggctttggaattactgctcaacatttgtcttacaagtctgatgccaacgttcagaaccagggcatcaagtttgttcttggaaagcttcgcggtacttag

SEQ ID NO: 2344 - DNA, 2493 bp, Aureobasidium pullulans
atgaagcaagcagccaccaatcttttggctcttgcctctacagcttacgctgctgccagctcccctgctggcaccaagagtggttgctactggaacactgatgctggacaattcaacactcgttttggccacgacttcagtattgatctgtatggtactgtggagaacttgattcccagcacctacactgtcaaccagggtgtcaaccctcttgctcgtcgtttcgacattgccaacattggttttgacggtgttgagaaagccctcacacttactgttcctggtggccagtcaaatggcccaatctctgttgctcaactcgcaaccagctacagcgatattctttacggctctgttcgcaccgtagctaagatctccaacgttcccggcaccacccacggcttcatcttctacgccaacgacacccaagaagtcgattttgcgttcttgacttctgacacctccaaggcttggctcaccaatgagcaagttacttacacctctccttattccacttacagcgttgctgctcccggagatgctagctctgcttaccacgagtacagacttgattggctccctggagtcagcaagttctatattgatggtgttttggtgcagacaattaccgataacgcaccgagtactcctggaagctggatttggaacaactggtcgaacggaaatgcttgggctcaaggaccgcctctttccgacagtgtgctgaagatccgcagtatcgacggctacttcaaccgcactactgttgcagacaacatcaacctcaaccccagtagttgccctgctgtcagctcatcatcttcgagcgtcgctccctcttccaccgtcgtctcgtcgagctcctccagcgtagtttcgtcatcttcctcgagcgtcaaagcctcgtcatccagcgtggtttcttcatcctctagcgttgctccctcttcgtccagcattgtctcttcgtcgagcactgtctcctcgtccagtgttgccaccacttcctcggctaccttgagctcatcgtcctcatcatcatcttctgttgctcccgccacctcctcttcggccgctgctgtcaccaacttctacatcaaggacgccaacaacaaacttgtcaacgttccttctggacaagacggtgtagccaactacgttaccagccagaactctgctacctcgttctacatcgatagcaagactggctacctctacgagaccggtgctccctacgccgccaaccgcggtaccagcgctaagcctgagatcacctacttcagcaccattggcttgggctacagctacatcacatgctctcagaacactgctcagacctggttggagtgcaaggccaacggagtggctcagcaagccatgacttgcggcaacgatggcctgctgtacttcgctcctaccattccctccacctgcgcatgggtacctctctactacgtctcgtccacctcggcttcagtctcggcatcttcggttgcatcgaccacatcctcgtcatcttcctcatcctcttcttcggtagcacccaccacttcctcgacatcatcttctgtcgcacctactacttcatcggtcgctgctcaagccaccgtttcgttcactaccgtcactaccgcttggaccggtacatttacaacaactactactgcagtttctggcctggctgccaccgtctacgtgcaaactcctgctaagaagggtgatgtcattagcacttcttccactgcaaaggcttcatacactacagtaaccactcactctggtaccgctggatccgtcggctacatcaccgcaacacctaaggtcgctggtgcaacaactactgtcacggtcgtgtaccccacccctgttactacttgcggcaaccaaggtatcaactttgctgcttacacaaacaagtactctggtggtcaagcaacctatggttacccctcattcagccccgagacttacaagaaggtttccccttggttttccgacgacaccacctacattgccgagtccaacgatggttctggcaccaagatcaacgtttatggttacggccctcttgacgctagcactcttgtccttgatcacactttctaccttttcgcctcccaaaccggttactacagtctcaacgtcccgtacaccgacgacatccagttcgtctgggttggcagcaaggcagtcactggctggacccgtgccaatgctgatatcactcagttctggagctctcagatcgccacccagactccccaaactttggcctactacctcaccgtcggcacatatcttcccatcagaaccctcttcgcaaacggaggtggccaaggtgatctcagattcaatatctatgctcctgatggtacatcggtgctctcgagtaatgctggacagaactcgggagtctcgagcgtggatatcgttgagttcccttgtaactctgctcttggagctcagttccctgcttggggcaaggagacttag

SEQ ID NO: 2345 - DNA, 1491 bp, Aureobasidium pullulans
atgattacatcgacttggacttctgctctagtagcagcagctttcgtaccatctattgtttctgcagttcctcatggtggacactctcctggaaagggccatggcatcgccgccgatgacttcgtttccgttgacggcttcaagctcaaggatcgccagggcaccgtctatctcactggactcaactactggtcctgtatgaacctagccgccgatgaccatgttggaggcaactactcgcgcttcatcactgaactagaccagatgaaagctcatggggtcaaccatctccgcatcatggctgcttcggaaggcgcacccacccatcaacctttcagaatgtatcctgctttgatggagagccctggaaactacaacgaagcaatctttgtcggcctggaccgctgtctgaacgagatgagcaagcgaggcatgcgagccaccatgactctggctaatgaatggcaatggagcggtggctttggtcaatacgtctcttgggctacaaacaacagtcagattccctacccgtcatcttggaatttaacagcgaatcctcagcgctctgagccaggcactggttggggcaattacacagtcgaaggcgtagatgccgaatcttatggcaacttcaccgcttacgcaaaccgcttttacaccatcccaaagtgtcaggaatggtaccatgcccatatctccaagattctcaatcgcgtgaacacagtcaacggccgcaagtacaaggaggacgctactgttatgacatggcagcttgccaatgaacctcaacccgctgttgtccctaccgaataccttggtccttactccctcgaactgccagcagcgcccgaagacgtcatcatcccctgggtcaagaacagcagcgcctacatcaaatcacttgcacccaagcaattggtcaatgtcggcttcgaaggcaagcaaggaaaatggtacttccaagccgtgcacaacttcagcactgttgactacggcaccactcattgttgggtccaaaactggggtgtctacgatatgctcaactcttctgctgcaaacttggaagctgcaaagagctttgctacagcgttcgttgccaactctagtgaatggagtagagagattggaaagcctgtctttcttgaggagtttggtatggcaagaaataactgggaaaatattggcaaggaatatccttacctcagttcggcgggcactggcaataaggatgagtacttcactgccatcatcggcgccgccatgaatgatttcaagtccgaaaacggaacatatgtcggaagctgtccttgggcatatggcggattatatcgtccggagacacaacatgccaatgcctttggcgaggtctgggctggtgacccgccgcatgaggcacccggttggtacgatctgtacgacaccgatgaagctatgaacattgtgcatcgtcagcagcaagatattgctcagtatttgagcaagggacattga

SEQ ID NO: 2346 - DNA, 1584 bp, Aureobasidium pullulans
atgctgtctcaaactctcgggctcgctgtcctcgtcctgcctctactcgccgaagcgaaagactgctctcaagcagccttccaaaagatcattccttccaattccactttcaactatgttacaaaagtggcagcgggcggaacattcacagatgcgtacgccaatgccaatgctacaggtctgcctgaaggatgcgctgtgagcgttcgcgtacccacgcctggcaactcgtcctacaacatggcgatatacttgcccaacaagtggaactcacgcatcatgacgaccggaaatggtggttatgctggctttaccaattggcaggatcttggaatctactctcagtatggcttcgcagctttgactaccgacaccggtcacgacaatgcgaacccgctggactcgacctttgctctcaacaaaggatcactcgaaaattggggatggcgagccatgcacggttcggtcctcgtcggcaaagcgctgtctgccgcatactacggagagaaccacaagtactcttactactcgggatgctcaactggaggccgacagggattgaaagagatgcaggtatctcctgaagcattcgacggcctcttcgttggtgctccagcatggtggattcctcacttgggcatctacaccagtcaggcaactcttggcaacctgcctcagaactcctctcaccacatctcggctgctttggctactgtgatcaacgacgagattcttaagcagtgtgatcctcaagatggtgtgacagacaaggttatcatgaaccctgagggatgtgtgttcaacccattgactttgctctgtgagaattcttcgaacacttctgcctgcatcacgcgccctcagctagacactctttacaaggcgctgcacgactggacctactttgacggcacattgatcttccctgcaccttcacttggtacgcccctgaccgcatacattggtgacagtcctctaccgaatcccatgggaactggcatgatccagcatcttttactgaacacaactgagccttacgactggagtaccttcaacgagagtgtggttcgtctctccgaagctattgatcccggaaacgcatctccagatgactatgacttgtcgacattccagaaaagaggcggcaaagttatccactggcatggcacttccgaccctatcattccgtacagatctagcacctacttctacagccaggtagcctcgtcggtcgctcctcacggtattgagatggacgacttctaccgattcttccctattgccggtatgagccattgctccggaagtcaatactctccctggtatatcggaggtgccagtcagcctttgaccaatgtcagccatggtgttccgggcttcgatgactcgcagcataacggtctccttgcattgatgcgctgggtcgaaaatggcacagctcccgagaggttaattgctactaagtacaacgaagacaacccagcgaagggagtgtaccgtcaaagacctctctgccctttccctaaacagcctgtttacacccatggaaagattgactccgcaagtagctggaagtgtgtatag

SEQ ID NO: 2347 - DNA, 1146 bp, Aureobasidium pullulans
atgtcttccatcaagtctctcgccctcttggccctggccaccggtttcgcaagcgtcgccagcgcagctgagactggcaagaccacccgctactgggactgctgcaagggttcctgctcgtggcctggtaaggccgatgtcagcgcccctgtcaccacctgcgacaagaacgacagccccttgaccgacgccaacaccgcttctgcctgtgatggtggttctgcatacatgtgctctgaccagtctccctgggctgtctctgacgacctcgcctacggtttcgctgccgtcaacattgctggtggttccgaggacagctggtgctgctcttgctacaagcttaccttcaccaccacctccatcgccggcaagtccatgatcgtccaagccaccaacaccggtggtgatctcggtagcaaccagttcgatctcgccattcccggtggcggtgttggtatcttcaacgcttgcaccgacgagtacaacgctccctcttccggctggggcgcccagtacggtggtatcagcagcaacacctgcagcaccttccccaaggctctgcagtctggctgcaacttccgcttcggcgactggttcgagggtgctgataaccctgaggtcgagtttgagcgtgttgcttgccctgctgccatcaccgccaagtctggctgcaagagaaccgatgatggagctcagagcgccgttgctgctcccgcctcgtctgctgtcgcttcatcttctgttgctcaggctaaggttgccgttgcttcctcttcggctgtcgcctcttcatcttctgagactgctccctcagcctactctacctccgaggccgcccctgttgcttcatccagctctgaggccgctcccgtcgcttcctccacctcttctgaagaggctgttgctgctgagacctcatctgtcgctgctgtctcgtccgtctacactgctcctgctgtcgagttatctgctgctgcttcatctgcttacagtgcccctgccgcttactcatctgccgcatcttccgcttatgtcgcatcatccagctctgttgctgctgcttcatcggtcgctgctccttcatctaccgctcccagcgatcatgccaactgcaacgtccagtacgtttacgagtacgatctttaa

SEQ ID NO: 2348 - DNA, 2199 bp, Aureobasidium pullulans
atgcgttcattcttttctactatcaccctgttgggcttcctcccagggctcctggcacttcctactaaggcagatgtacaagttcagcccctcgagaagcgtggtactcgcactaccgctccaaaaggatgtctttctgtcggctctggagccacttacaccactatcgcctctgccatcaaggctctaggcggttccaaaaacgacgcatgtctctacatcaagagtggaacctacaaggaacagttgaccatcgactacgccggtgctctaaccttctacggagagactgccgatacatcgagctacaagtccaacaaagtcttgatcagccatggcatcagctctccagctgcaggcagcctggatgcaagctccaccatgaacattagagcagcgaacttcaagatgtacaacatcaatgttgagaacagtttcggaaagggtgcacaagctgttgcagtcactgcaaatgccaacaagcttagcttctacggttgctctttcctcggttaccaagacacactctatgtcaagaccggcactcagtactactcaaactgcttgatgaagggtgccgttgactacatctttggagacgcttcagcctggttcgattcatgcacaattatgagtaacggtcctggtgctatcaccgcttcgtctcgcaccaccagcgatgacactgcgtggtatgtcttcaacaacgtcaatgtcatctctgatggcacagatcttgtcggcaaagtcttccttggtcgtccttggagagtcaacgcaagagtcatgttccagaagtctcaactctcgaacgttgtcaatgccgctggttggactgagatggccgatggtgccactcccaggtactacgagtacaagaactctggtgttggttccaacacctccaagcgcaagtggacaataaatgcttctgccgctattagcatcaacaccgtgcttggagacagctacagttcttgggttgatcaatctggtaccggctctagctcttcttccacttcaacaaccgtctcaaagaccgccgctgcaaagcaagtcacccctgctaaatctgcagtcgccaaaggtcctgtttgcactcctactgccggaggtgctgctaccaaggatgatacccctgccatctatgctgccatccagaagtgcggaaatggcggaaccatcgtgatccctgctggcaagacttactaccttaacactgtcctcgagtttgacgggtgcaagtcatgcgccttccagcttgacggtacactaaaggcctctgatgatctaacctattgggaaggcaagactgctatcctccacctgaagagtgttcctggtctcaccttcactggagctggagtcatcgatggaaacggtcaaaaggcttgggaccacttcgctaccgatagctcctacaagcgtcccactctcttttacatcgatggtggcgacaacatcaagatggatggttggaccatgatcaaccctcccaacgtcttccactctgtcaagggcaatgctctcaatatcgcttactccaatctcaacatgtctgccgtctcgacttcgaagaatcttccaaagaataccgatggattcgacattggtgcctcaacatatgtcactctgaccgacatcaccgtattgaacgatgatgactgtgttgccttcaagcccggctctaacttcaccactgtcatcggtatcacctgcacaggctctcacggtctgtccgtcggctctctcggaaagtccaacgccgactccgtctccaacatctacgtgtcagatgccaccatgatctcttcctcaaaggccgtcggcatcaagacctaccccatgggcaacggtcacggcatctccacagtcaccaatgttacctacaccaacatcaaagtccaaaattccgactatgccattcaaattcagagctgttatggtgaagatggcacttactgcgagaccaatgccaacaatgctgtcttgaagggaattgtattcgagaacttctccggcactactagcaagaagtattcgcctactactgctaatctgaactgtggagctaagggaacttgtgatgtcaaggtcaagaattatgctgttaaggctggttcggggactggacaggtgctttgcaacaacacgcctggaagcatgggcgttgcttgtacaaagggtgcttcggggtga

SEQ ID NO: 2349 - DNA, 1452 bp, Aureobasidium pullulans
atgtttggaaagaagtcactttcttacctgctgcttgctgctgcggctcaagcaaagtatatcgtccctggaggcagatggaccgatacagatggcaatctcgtcaacgcacatgctggtggtgtgaccgttggtaaagatggcaagttctatcttttcggcgagtacaagactcaaggacagactgaaggtggaggtatttctgtctacagtagtgatgatcttgctacttggaaatctcatggtttggctcttgagcctattgaaggacatccttacattgcacctgacaagatcattcagagaccgaaagtgttgtacaatgctgtcgatgaccaataccatatgcactggcacgcagacaatagcacttacggctggctccttcaaggcctagcaatctcccccaacatcacaggtccttatactttcctcaatgccaccgcccccttcggaaactggtcgcaagacttcggcaccttcaccgactacaagactcaaaagtcctacgctttgtattcaaacggcgaccgcaaagaagccagagatgtctaccttgccgcctacgatgactctaacaccgagttggcggagatcgtccatcgctttgacaagtatgatttggaagctcctacgattatccagacagacagttcctactatgctttgatgagccacaagactggatatagacctaacaatgttgtcgccttcagagcaaacagtcttgccggtccttggagtcaacctttctttgtcgctccattggggactagaacgtataattcccagtctggcttttcgctcaagatcaacggcaccaaaaagactacttggttgtatatgggtgatcagtgggactcgaactccctttgggaaagcagatatatctggttgcctgttgacattgatgacaacaagcaaactctcaagttggagtggtatgatatctacgacttggatgtcaaaactggtcagtacaaagaagtcaagggcaagacctactacgccaaagacgccgtcacagcaggcgatgctttcaaacaggaagccaattttgcctcttccaacacaatagtcacaggcatctccggcaacgcgtccacactcaccttctccaacatccaaggctccggctctccccaatggatctccttctactatcaaaacactgatgacatgggtttcggcgaccaacccggcggctccccggatcgcatcaagacgccttgggcactgcgccgtatcgcttctgttgtggtcaatggcaacagcagtgatattcagacgctctaccaaagagacacacacaagggaatcatcctgagcaccccactaaaagtgaatttgaaaaagggcagcaataccattacgatcggtggattggataacggtattgatgtcaaaggagcggatattgataggattgtggtgtatcctgctgagaagtga

SEQ ID NO: 2350 - DNA, 816 bp, Aureobasidium pullulans
atgcatctttcaaaatccgctctatcatgggtgactggtattaccagcctcattgccaccagcgatgccacgcctcttgagaagcgtgtcactacatcgcccgccgcaccattcgacggatgtctctatcaggtgtctaaagttggtgccttcaattcccgcatcgctgtcacgaactggaacaagttccccttcaccctcaaagccaccgatcgcactggtggcccggctcgtgtgcgatggaaccctgccaacgtcggtgtagacgccaatgacggcagtctcaccttgactgttcccggaggccaagcaacatgctccgacgacagcccttgtggaagtgcccaaatcaccaccgcatacgacgatatcatgtacggaagcatgcgtactgtcgcaaagacacccaatgtctggggcaccgtcagtgctatgttcttctacagcgatgacaacaatgaggcggacattgagattcaaaccggaaacactacatacgcacactttaccaaccaggactggtacggagacaacgctctgtcgaacagcagcgttgtcgcagacacttcggctgcttaccacgaataccgtatcgactgggtgcctggaagaactgattactacgtggatggcaaacttctgcagacctacaccaaattcgtgcctaggacgagcggatattggatgtggaactcttggacaaatgccggttactggacctacggccctccagccaaggatgccgtccttcacatcaagtctatcgatgtatacttcaatcgtacgagtatcactacctgtggtagcgcttcttga

SEQ ID NO: 2351 - DNA, 1458 bp, Aureobasidium pullulans
atgagctatacacttcatctccaaatcctcatctccgctctatgtctactcttctgcaagccctcgtgcgccacccctaacaacggtagactcgacctgcaacttcctttcgtgcccgtgaaaacccctcctttgtcgaaagagcataattttaccttgagacacatttaccacaaaggatctcaccgatacccacgacttttccgcaaaatcgatattcatcacgattcacttgttcaagatggcacaaaagagagctgctgcgatggcgaggcgacttcaacagcgtttactgtcaaatcgaatgcacttgagatacagcgactatccgaccgcagtcgccacagcatcgatagtttattggaagctggagaattcttgggagaacctgtttcgctcacctctgatgcttggacaatagatcggatctccgggcctgacgtcagtgataagagtacggtgttgagtctcgcacacattgctgcaaatgcatacgtcgatccgccacatggaggagaatggaccgatattggtggaggtttcaactacactgaggatttcgggtgggagcgcgatggactacgcggtcatgtgtttgccgacacggaaaacaaaaccgtgattattggactcaaaggaacctctttaccttatttcgacgacggcgagactttcaataacgatatcctaaacgataatttattcgggagttgctgctgtggtcaaggtggccaatacgcgtggaagaaggtttgcgactgccagacttcaacaaatacctgcaactcaagctgtctgatgacaagtctgcggaagaaaagcaactattaccatgccgctcgacatctataccataacatcactgcaatctatccagatgccgatgtctggctgaccggacattcgctaggtggcgtggtatcctcgcttctgggactcacctacggactccccactatcactttcgaagcctttcccgatgccctcgccgctcgacgattgagtttacccacacctcctggctaccgcgttggtgacgttgaaaaacactacactggtatctatcatttcggtcatacagccgacccggtatacatgggacactgcaattccttcaactcaccctgcacgattgcagggtatgcgtttcagagcaaatgccacactggacacaattgtacgtacgatacagtcggcgatctaggttggagagagtctatcggtacgcacaggataagcagtgtgatcaaggatgtgattgagaactacaacgccactccgaggtgtgagcaagatgtcgattgcgctgattgctctgagtggaagttttttgatgaggaaaagactaccactacttcaaggatagaaagctcaacatcccagaccacgactaccatttgccagaccccaggttggtggggctgtcgagatggtaccacaagcacaactactttctga

SEQ ID NO: 2352 - DNA, 1848 bp, Aureobasidium pullulans
atgagtgctgcgaaactcttcttggtcgccggtctgcttgcgagcggtgcctacgcttcacccatccaggcaagaactccttatgccgtcaaggactcccactttgttccttccaagtggagacaggttgctgctgctccctcgactcacaacattgatctccgtattgctgtcaagcagaaccaattcactgatttggagaagcacttgtacgaggtttctgaccccgaccactctcgctacggccagcacttgagcgagctcgatgtcaagaagctcgttcagccttccgacgactcactggctctggtccacgagtggctcgccgacaacggcattgaagccggtgatctctcctacagttcttccaaggattggatcaaggtctccctccccgttcaccgcatcgagagcctcctcgataccaagtacaacgtctaccgtcacgaggatggttccgagaccgttcgcgcacccgagtggtctctgcctctgcacttgcacgagcacatcgacaccatccaacccacaaactctttcttccgcagcagccccaaggccgtttctctggaagttaacaagtttggtggctcatactcccaggatgtcacttaccaccaggaccctaacgttactgctatctgcactcctcgtggcgtcacccctctgtgcatgagaactctttacgagaccattgactacattcctcaagtttctggcaagaacaagatgtctcttgtcaactaccttggcgagaccaacaaccgctcagacacatacctcttcctcgagaagttccgccccgaagccaaggaaactgcatacgaattccagttcgatgtcatcaacaacggcagcacatctcaagcaaaggtcactagcagaatcgacatcgaaggcaacctcgacgtgcagacaatgcttggcttctcatatccagtgccgctcacagcctacactgtcggcggatcacccgatttcatcccctcgaacggcacaaccaccaacaccaacgagccctacctcgactggctgcaacacatccttgcccagtcagacgacacaatcccccaagtcgtctctacctcctacgacgatgaagagcaaaccgtccccgccagctacgccaagcgtgtctgtgaagacctcgctcaactcggcgcccgtggtgtctctgtcttctactcctcgggtgacagtggtgtcggcggctccggcagctgtgtcaccaacaacggcagtaatgccaaacgcttcattcccgaattcccctcgacctgcccttacatcacttccgttggcgcaactatggacttcaagcctgaagttgtggcttatcatgcctctggctacgcttctggaggtggtttctccgatcttttccccagacctgcctaccaagacaaggctgtcaaggcttatctgaagggcctcggagatagagatgctgcatacttcaatgctagcggaagagcctaccctgatattgctggccagggaagttacttctcgaccgtctggaacggcactgatactctcgtctctggtacctccgcctctacacccctcatcgccgcgcttgttgctctcgtcaacgatgccctgctcgctggtggcaagcccactcttggtttcctcaacccctggttgtacaagaagggttaccgcgccttcaccgacatcaccagcggttctgctgttggatgctctgagattggcgatggtaagggcttccctgctgtcgagggatgggatcctgttactggtttcggtactcccaagttcagagacatcattcatctccttggcgtacacggatactggaaccacaccggtggctggagttag

SEQ ID NO: 2353 - DNA, 2094 bp, Aureobasidium pullulans
atgggcaagcgtatactcacatcatgcttggggctgctagtgctcggacgatgtgtatttgcaactccaagtacaactcagctcggtagtgtgactattctggccgctgatgatttgatcactaccaacaataacaagacgagtgccgctcttctcctgggcacaccattgactctagcatctgcactcactgcatgcgagtcactacacgagaatctatggtcaccttcgttgcatccttttactgctggtctgaacaattcattggcatacgaggtcttcagtggacgtgttgcaagcagtcagctcttctggactggccagtctcagtctcaaccgtcatcttcaaaatacgccggctctccttcacattcaagacctcctcaccagcctccacaatgtcaggccattgatgtcaacggagatacgcatcatgtgagctgcaaagagaggctacctgtcttatgttcccagaccgcttccgcgtccaacataacatacgcagataattctccgccgtatcagatctctcaagccgttggctttcaaacacttgttgggtatagagacttcctgacatttcgatttatgggagttcgcttcgcagccgagcccgagagattcacacactcttctatctacgaggggacggggactaatgatgctcttgagcctgcgccggagtgtctaaccttgcccaacaatggctcgacagactgtctgtttctcaacatttggaccaccagtctgcctagaccgggtgcaaaacagaatctcaaacctgtgatggtctacatctatggaggcggcttcactaccggatctgcaagtaatccaacaaatgacggaggcaaccttgctgctcgaggagatgtcgtggtcgttgacattgcttatcgtctatccaccctcggcttccttgcgttagacgatggcgttcacaaaggcaattacttcctctccgaccagatcgctgccttggagtgggtacagaagcacattgagagttttggcggagacccatctcgtgtcaccatattcggcgaatcggctggtgctgagtctgtgaatgcgctcatggcttcgccaaaaggcaaaggcttgtttcatggagctatactgcagtcgaactactaccaaccttacgtccccttggtcactgcagtcaatcagagcacaactccgatactcaatctcacaggttgccgcgatgccgccgatcagttggcatgcctccaagcatacaatgctactgagttgcttggtctcaaaactgtcttcaactaccctgttgttgatggcacatatctcgtgtccgagttcattgatcttaacagtacgacagacgtcacaaatcgcgtgccagtcatcatgggcgtgaatcgagacgaagaaggagtccttggcacagtatacccaaccaccaacctcactaccggcattgatgacatagctgctgcaaatcatctcaacgccagtgacatcctcgcctcagatctcttccctcttggtgccagcgacaacaaaaatgccactctgaatgtcttcaatacaaccactcgcatctccacagatgtctctttccgctgttccaaccaattcgaagcctacgccggcgtcaaagacggtgtcctccccaacatatggttctacgagttcaatcgcacataccaagatccagcatacaaccccaatctcgtctgcgcagctccagtcacaccttcctatccttatggcgacccttctcaggaatacttcaaatgccacgccggagatctggcaaacacctttggcaatgtagctcgtgcaggtttcccagatcgagatggcttggatgcgaagtttgggcagttgattaccgattattggactagctttgcgagaaatcatgatcccaatcctgatatggcatatctcaaggtcagagggtactggaatactatcgcgcagattgagaagtcgggtgcttgggagaaggttgatgtggagcagccgatgatgatggagctgcagtggaactcgatcatgatgcctttcagagatgtcgagcagtgtgctgtgttgggttacccgctggacttccttactaggtga

SEQ ID NO: 2354 - DNA, 2970 bp, Aureobasidium pullulans
atgaggatctctttacgtctcctcgtatacactctcttcctttgtgctctggtcctggctacggacaatggcttgactacccaagtcacctgggacccttatagtctcatggtgaatggagagcgactgttcgtcttctcgggagagttcgcctatgaacgtgtgcctgtaccagagatgtggtcagacatcttccagaagttcaaggccaatggtttcaatgctgtcagcatgtatttcttttggtcttatcactctgcttctcgcgatgtctttgatctcgagacctcgggaaaaaatgttcaagctgttcttgatgctgctgctgaagcgggtctatacgtgatagcaagaaacggaccgtatagcaacgcggagaccaacgctggtggacttgcgctttggacttcagatggctcaggtggcaactatcgaacatccgatcaggtctatcaggacgcttgggctccctggatcaaggcactaaacaagattctggtgaggaaccaaattacggaaggtggacctatcatactttatcaagtggagaacgagctgcaggagactgtccacaaggctgataatacacttgtactctacatggagcaactcgagaaagttgccgtcggctctggaattgtcgttcctctgactcacaatgagaaaggccagagaggtcaaagttggtcaaccgactatcaagacgtgggaggctcggtcaacatctatggtttggacagctatccaggtggtctatcatgcacgaacatcaactcgggattcaacctagtccgcaattactaccaatggttccaaaattattcccacacccaacccgagtactggcccgagtttgagtccggattttaccaaccctggggaggcttttggtacgatgagtgccttgcagaacacgaccctgcattcgctgatgtttattacaagaacaacattgcccaaaggggcacgcttttaagcctctacatggccatgggagccacaaattggggcaatctggcggcacccgtggtctatacgtcttacgattattcagcacctctacgagagacacgcgaaattcagctcaagttttctcaaacaaaacttattgcgctcttcacaagagtgtcgcaggacctactctacaccgagatggaaagcaatggtactgggaatgctgtttcgactcaggatatctggacatgggtcctaagaaatccaaacactactacagggttttatacgacacaacacgcaaagtcaagctctagagctgtgacagacttctctattaaccttcagacatcactgggtcctatcactgtaccagatgtccagttgaacggccgtcagagcaagattgctgtcacggattaccactttggcaagaacaccttactctattcgtccgttgatatcctcacctacggactgtttggctcgaaagccgttctcgtcttgtatcttgagcaagatcaagttggcgaattcgccttctctggcaatgtttcgatcaagtcttatggtaacacgaacgttacgacatctcgcgttaagagcaacggaactgcgtcctataccaagctggtctacaagcaaacagcaggcaagactgccttacaactatccaacggtgtcttgatgtatcttctcgaggtcactacagcctggaaattctgggctcctccaaccacgtccgaccccaacgttgctccggacgagcaaatattcgccatcggaccctatctcgttcgcaatgccagcgtcagtagcaacgttgtttccatatctggtgacaacaccaactccaccactcttgaagtctatgttggtgatgcgagcgtgaatacaatcgtatggaatggcgaaaagcttcccaccaagcaaacagcatatggtgctctcacagctgaccttgcttcgattgtggaccgcaaaatcactataccaacactctctggatggaaagtagctgattcactaccagaagccgccagagattacgatgattctgcttggaccgtatgcaataagaccactacccgtgctccggtcaagccactgtcacttcctgtcctatacagctccgattacggttactactccggtaacaaggtataccgtggttactttgacgggaagaatgcagtatcggccaatgtgactgcccaaggtggctcagcagcaggttggagcgcttggctcaacggcaaactcgttggcggtgctcctggaaatgcttcattactttcgacaactgctgtgcttgatttttcgaaagcgacactctacgacaaggacaatgtactcactgtcgtgacagattacactggccatgaccagacgtctactggtaaaggtgctgcgaatcctcgtggtctcttgggcgtaaccctcaaaggctctagcaacggtactgctacattcaagcagtggaagattcagggtaacgctggtggctcggcaaacatcgatcccgtcagaggtcccctcaacgaaggcggactgtacggtgaacgtcttggatggcatctccctggtttctctccctcgggcactgaatggtccactggctctcctgctcaagggctcaactcgagcggcatcaattggtacgtgacaacattcgacctcgatatcgattcagacctcgacgttcccatcggccttgaactatcggcccccgcgggtactgttgccagcatccaaatctatttaaatgggtaccaatacggaaagttcataccacacatcggaccccagacgcgcttcccgttcccacccggagtcatcaacaaccaaggaaagaacactcttgctcttagtgtctgggcagagacggacgcaggtgccaaactggacactgtttcgttgttcgcatataatgtctaccagacatcctttaactttgcacaggatttcagctatctgcagccggagtggacgagcgagagattgcaatatgcatga

SEQ ID NO: 2355 - DNA, 1008 bp, Aureobasidium pullulans
atgcgctcatcactctctttgagcctttcgcttctcgtcggcctggtgtcggctgccaactacaagctcgtcaaggacttctcgggcaacaacttctacaaccagttcgacttcttcaccggccccgatcctactcagggctttaccaactacgtctctcacgaccatgctgttgaatacggtctgatctggaacaagagcgttcccacctggggcgtcgactcctacactcacctcaatgccaatggtgccaatggcggtcgtacttctgtgcgcatgaccagcaaggacaccttcacccatggcctcttcatcgccgacattgcccacatgcctcagagctcgtgcggcgtctggcctgctttctggacctttggtcagactggcaactggcctcagtccggcgagatcgacattatcgagttcgccaaccttgccagccagaacaaggtgtccggtcacaccatgcctggctgctccatctctggcacctctcagagcggtagaatccaaggcagcgattgctcgtctgcaggtgatggcgccggttgcgctttcctgtccccttccagctcgagtgcaggtaccggctttaacgccattggtggtggtgtctacgccatggagtggacctctcagcacatcaacgtctggttcttccctcgcaacaacattccttcatccatcaagaacggcaagcccgatgtcagcaagttcggccaacccatggccaacttccgcggctgcgacctcgacagctacttctacaaccacgccatcgtcttcgacaccactttctgtggcacctgggctggcgagaccttcttcaacgacggctgctctgcctcctcgtgcgttgacttcgtcgccaataacccttccgcattcaaggatgccttttgggctgtcaactacctcaaggtctaccagcaaggcggtgcctccaaggccaagcgcgacttgatccgtcgccacgcaaagcagacccacggtcacggtctcatctaa

SEQ ID NO: 2356 - DNA, 1158 bp, Aureobasidium pullulans
atgtcttttctcctccgccccgtactcttcctcttatccctcctccccatcctcgcatcagcatcaccacgccacttctccaccctcaaacccgcctacttcctcctcgccggcgacagcacgaccgcgacccaaagcgccaacggcggcggctggggcgacggcttcctaaaccacactctccggcaaggctcctcgggccacaactacggacacaacggcgccacgacaaaatctttccgtgaaggaggtgactgggcgaaagttatcgaagaagtcaaaacaaagattggaaactacaccgtttatgttactattcagtttggacataatgatcagaaggttaccagtggggttaatgtgacggaatatggaagtaatctcgagaggtttgggagggaggttcaagaggttggagggattgctctcgaggacgactcttctatgcctgaggacaagtcaaagtctggagatgacaacaactctcctgaagccgacgacaataactccgagtctggagacgacaacaagtcagagtctggagacgacaacaagtccgatgctagagacggcaagtctgagcatgaaaacgatgattcttttgagccagaagacgtccccgagaagatatgcgctctcttcagacagcttaatcccgagcacatcatcaacagcatcaaggaagtcgttcttggtgacatcgagcatctcgtcaacatggcagatggccgcgaactcgacgccagcaccatcatcatgctgttcgatgaagccatgaagactcgcaccggcaaagccaccatcatcgcactcaacgctgctgctcttgtcgtttgtatcgtcatgattgtattccccttgcctactgctgccccagttctcggcgctctaggtttcactgaggctggacctgctgctggatcgatcgctgctgcttgtcagtccaccttcggaaccaatgctatgttcagtaccctgcagagtgctgccatggctgactatggtgcccccgtcgtcgctggcgtcgtccagggtgctgctgctgctggagccactgtcgctagcttcagtttgttcgaagccttcgatgagccctttgtatgccgatggatcgcaaaagatggtgtattgcaaaactttgcaaaggaacgatcgtag

SEQ ID NO: 2357 - DNA, 1875 bp, Aureobasidium pullulans; identical to SEQ ID NO: 1970

SEQ ID NO: 2358 - DNA, 2640 bp, Aureobasidium pullulans; identical to SEQ ID NO: 1971

SEQ ID NO: 2359 - DNA, 1827 bp, Aureobasidium pullulans
atgtttatcaataccctttttcttcatgtctttgtgctgtccgcactcggttcggccaaacatgttccacctggccctctatctccttactgtggactcaatgtgacatacaaacagaactccatttgcgaaactactcctggagtcaattctttctccggttatgtgcatcttccatcctctctcctggcggattcgcaaaatgcgtctgatccgtacgatatttcgaccttcttttggtactttgagtcaaggaacaagccaaggcatgctccgctgactatctggttcgccggaggacctggcgcagcttcctctttcagcgccatgaccgaaaatggcccatgctacgtcaacgaatatgccaacgacacagttctcaacccgtactctctcaacgagaactccaatgtcttgtacattgatcaacctgttcaagctgggttttcgtactcctctttccagaacagcacttacaactttcttgcccttgatacatcagtttctcctgttacgccgatggatgcatacgatggcgatgtcccgcctgagaattcgactttcaagtatggcgtttgggcggatcaaagtcggaggcatacggctagtacgacgatggatgctgcacgaccggtctggcatttcctgcagagttggttcgagaactttccagagtatcgtacgagtgaccgtcgtgtcaatctttggggcaactcttatggtggtttctgggtcaccggattcacttctcacgttcttgctcagaacgcacttgtcaagaatggaacacttggtggtcgagtgatccctatcaacaccattggtattacgaatggatgtgtagatgcattcacaaccgtacaatcctacggcgacatcgcatacaataacacatacaatacctccttcatcacctccgaagtctacgccgacatccaaaacaacatcaccaagtccggagggtgctacgaccaaatccaccaatgccgagctgcagtcgctctctccgatcccacaggcactggaaacaacgataccgtcaatgccatctgtgccggagccaccgtctactgtcttgcttacgcaggcaatggagcttacttagctgcttccggccgcagtgctttcgacatggcagaaaatgccagtgccccatatccaccattttccgccacgacctatctcaatcgtcctgaagtccgtgaccaactcggtgttcctgtactgttcaaaccaggctccatgaccataaacaacaagttcatctacggcaccggcgatctcgcccgtgtggatggtatccatgcactcaacgccatcttagcttcaaatgtcaatcttgcactggtctttggagacagggatacaagatgcaactggctcagtggcgaaaccgtcgcgaatacaatcgattggaagggcaaatccgcctatgcagccgctggataccaagaaactcaaacaaattcgacatacatcggcggtctgaccaaacaattccaatccctaagtttcaccagagtattccaagccggtcatgcagtaggcttcttccaacctcaaaccgtcttcgagattttcgagagaagcagtgtgtggagtaccgatgttgcgactgggaaacagaagataagtagcaatgggacgtatgggactaaagggcagagcagtgcgtggagtcatttcgaggtattgccggaggtgccggagccagtttgcgatatttgggatgtggggacgtcgtgctcggaggggcagattgaggcgttggtggaggggatagcggtgattgtggatgatgttgtggttagtccggcttatcagtga

SEQ ID NO: 2360 - DNA, 3036 bp, Aureobasidium pullulans; identical to SEQ ID NO: 1973

SEQ ID NO: 2361 - DNA, 960 bp, Aureobasidium pullulans; identical to SEQ ID NO: 1974

SEQ ID NO: 2362 - DNA, 2565 bp, Aureobasidium pullulans
atgaggttctccaacgctgctgtagtctcaaccatcctattcctctcggtatgtgcagccgagctcgagtgcgctagtcgtactcctacagcctcacaagcgacacttccgttacatcttggccccacctatccgacaagttcctctcttgctacctccgccgaacctcataccgtacacactcaatgcgaggtggtgcctcttggatggggtcgcgacgatgcaccacagatcctaaaggctgtcgagctttgtggcaacggaggcacgatcaccttgcctgcgccttacacgtacacaatctcaagtcgtctctacatgcgacttactcgtgcaacattgaacgtccatggtcttctctcattcacgcccgatcttggttactggatcgaaaactcccaccgcgtcgagttccagaacatgagcacagcttggatcatcgaaggtaatgactttattgttgatggtggaggctggcaacaaggtggcatcaatggaaatggacaggcttggtatggtcgagccgcaggtcaaagtaaccagtatggacgtccgatcagtctttcaatctacaacagtgcgaacgtcagcatcaacaactttgccttctatcaaccacagttctggtctgtctgggctcaagactcgcgaaatattaccatgaccaacatctacatcaatggaatcaacaccgatcctgctggcaacagttcaaattatgccatcaacgtcgatggtatcgatactatgcgcgtcgatcagatgagacttgagaactggacattccacggaggagacgactgctttgctccgaaaggaaattcgacaaacatggttctacgcaacttcacctgcataggaggtggtatcgctttcgggagtgttggccagtatcccggtcaccctgattttatcatcaacgttagcgtgagcgacattcgtgtcagtcaaaaaatcgatgcaaagtatggtggcgcggctgtcgctgcaggggcttacttcaagtcatgggtcggagtggagatgggaaacccacctcaaggaggaggcgggggtaccggccgagtgtcgaatgtgactttccacaacctcattgtcgaaaataccacacaggctgtctacatcaacaagtgctacttcaaagtgcctgctcaaggtgcatactgcaacacctcaacattcgagttccaagacttcgacttcaacaacgtcagcggcacagttcgcacaccaattggtgtcaacctcaactgctcacaagcagcaccttgccgtgaactgaagttcagcgagctcaacttgcggcaatccaaaaccaacaaaactgccattgctgtttttgagaatgctcaaaacccctctggttctggagatagacttgtgagaactaagaccttgatgtacacatggctacacggtattaccaagagttcaaccgaaattggcctcttggggcgtggatcggtagagtttgctgtgcttcagaccatcgcccatcgcggtctttttcacgatgtcaacgaccacaacgccttggctgagaacagcgttaatgcaatgtatcgcgctgaagctttgggtctacctggtgtcgaattcgatctccggttgagctctgacaatcaagtccttgtcttccacgatatgatatccaaccgtgccacttccaacgacaactatggtggccgtcttgatgctgttgacgtgtccctgaatcttcagccgctagtggctcccatcctggtcaaatctagaccagcgaactcctggattggcaccggattgaaggctttcggtcgcaatggacagatcgttcctgccgatggcgcacagaagctggaaacactggactcgatgctctcccacttcaagaacctcaacaatcctaacttctggttgattctcgacatccaagacccggtcatcttcagcagagcggcagccgcggtgaacgcccatggtttgagtaggactgtattcctcaaattcttcgcaacgaaagccatcaactccaagggtatcaaatacaatggagccaacacttgctatcagtatgcgcgtaagaatcatctcagcgatctacaaatcattccccagatcaacgatggagagctccatttcgaaggagaaactgcgtacctcaacgtcttcaacacaaagttatcagttagagaatatctccagtgttgggcagacgctcagaaagctcattctggaaacggagcagctcttatgcccatcgtgagtgcgagtgttccagccaataacgaagtcgcattcaataccgctcgagatacgttggcctgggccaagagcgcaggcagaaagaccatgtccattttgcccaatccagatgctggtcgtattatcaacacgcagtgcactttgtggacctatcaatccggcagtgtcaaggcagcaagatttgacgaatctgcacgcaagacgaaacttgcctttgtggaaatcgcgaagcctgattatgttgttcttgacttgatgggtgatttgggcaatcgaagatggattggcgacttctctagctatatcatctatctttgctga

SEQ ID NO: 2363 - DNA, 1026 bp, Aureobasidium pullulans
atgcattttctcacttccatcgctaggctaagtgccattgccgccatcactgtttctggtgtaactgccgctcctgcatctacttcgcttcaacctagagcagacgattatgtcggataccttgtttccaccttctcggatgtaacacctgctgtccaattccacctttccaagggcaatgatgctggcagttatacttttttgaacaagggtcagccggttttgaagtcgactgtggggacgaagggtgtgagagatgtgtttttggctcatgatagtgcgaggacgaattactacatgatcgctactgatctcgatatcaatgctgcaggattcagctgggatgccgcaacaagaacaggaagtcgtggtatcgtggtttggagttccaaagacctgatcaactggtctgcatcttctctccgcactgtcgagagcgcaaacgcaggcatgacctgggcaccctcggcagtctgggacgacgcaacatcccaattctacgtcttctggtcttcccgcctctatgccgattccgaccctaaacacactggcgttgcctctctcgaccgcatccgttacaccacgaccaaagatttcgtcacctttgcacccgcaaaggattatcttgctcttgccaacacacctctcatcgaccaagaattccaatatctaggcaagacaggctccttcgcacgtttcttgaagaacgagacggtgaatcaggtctatgtcgagacgacgactggtggtttgtttggcaagtggacgcgtacgcctggctatgtgagaccagagagtccgagagaaggtcctgcttcgtttgttgacaacgttactcctggactctatcatctgctgttggacgattacactcagtatgtgccttaccagtctaccgatccggcaaagagtggtgcttggactgcttcgaactaccccaacttccctaagggtctgaagcatggatcagtgactccgttgacacaaaaggagtacaatgctgttgccgcaaagtatcccgcttaa

SEQ ID NO: 2364 - DNA, 2064 bp, Aureobasidium pullulans
atgcgcgtcactcaggttatcgctactcttgcgccgatcggtcttgttgccgccggccctctgcataatcatcatcgccatactcaccttcatcatctgcaccatcgttccgtcaatggcacttcttccaactacaccacaagcgataccgcaaactctacaatctttgctgatcacatcacatacgagacttctacagtcaacgttgctgctaattttgctgatggtactgatgcaagttcggccagctcggaggcagcttccagcaccatctcagaatcaagcagcatcctctccactactgcgcagtcagaaactgcttcctcaacattgtcactctcttccggtgcttcgtatgtgagcgggtctccatcgaacgcatcatcggccttgatcatttcctcctctattccttcggaagcatctgtctccatcgttcttgctgtcgcagcaaccacacccactgctgtcggcgcactctctcagactgttgataccaccaccagcatatctgtcgacaccatctataacaccatcactgtcaatggagctgtcactaccgcatctgcaagcgagaagactgtcaccgtcactgacgttgtgaccaactttgtcactgcgaccttctcggcattggcacccttcaaggctcctgctatcaaggttgccgcaatttcttccggatcttcttgtgcagccatcaagactagcatcgtctaccttcccgccagtgtctcacccactcttgttgctggaggtgctgcatccagcaaggtttcatcgattgcttccaaggctaccagccaaagctcaatcagcgcatcttcattgaagattagcaccgccacctcggtcaagaaggtcaccagcagcacttcatctgtcaagaaggtcacttcctctaccaagcctgctaccttgattactctatcctctctggttcaaaagggtgccactactaagactatcatcagcacttccagcattgcagcctatgttcccagctccagcgctaaggtgtcgagtaagagtgctgtcagctctgctgccagctctgcgaaggctagtgcatcttcttgcgctgctgttgccgctcctgcttctactcagactggtatcgtctctggctgtaccaagtggtacacggccaagtctggcgattactgctatgcaattgcttcggccaatggcatctctacggacactttcatgtcctggaaccctgctgtcaatgcaccctcttgcgacagcatctgggtcggatacgcctactgtgtcgccgcaggctgcagctccagctccagcaacacaccttcctcggctgccaaatcctcagcccaagcaagcaccgcaaagacctccaccgtcgccaccgccgcagcaccatcgaccaagacatccacctccgcagcgacttccaccgtcgtcgcatcttcctcgtacaaaatgtacagcggcaacggcaccgtcgccgccggctggcccgcccaaaaccaatggatcgacttcgacaccatgttcaccgccaacatccccatcatgaagcagtcctgcggcaacaacggctggggcgccaacgactcggacgacgaaatcgccgccataaaagccgcgatcaaaaaggtttcggcatcctcaggcgtagatgcacgtttcatcctcgccatcgtcatgcaagaatccaacggttgcgtacgcgttgttactacctcttggtcagtccagaacccgggattgatgcaagatcacgcaggcaccggcacctgcaattccggcggcgtgatccaggatccttgccccagcagtgagattgagcaaatgattgtggacggcactaccggcaccacttctggcgatggacttgtgcaatgtttgagccaagccgccgcgtcagatgtatcgcaatattaccgcgccgcacgcatttacaacggtggatactctgggttcagggctgatgatttgggtactggatgttgcacgctttgttatgcatctgatgtcgccaacagactcaccggatggagttctggtgtcagtggatgccatttgggcactgcatag

SEQ ID NO: 2365 - DNA, 1134 bp, Aureobasidium pullulans
atgagatctctcgcattccagtcattgtccctttccggactggcagcagtagctgccgctgccccagcttcgaacatcgccagagccgctgatgcttgtcatgtcacatcgtactccggtgtcgctgctgctgtctcttcttgtaccaacatcactctggatggtatcgctgtgcccggaaacaccactcttgatctcaccaagctcaaggcaggcacgacggtgacgttcgctggcaagacaacttttgcctacgccgatgccaactacgatatgatcaagttcgctggtaccaacgtcgtgctcacagcccagaagggcgcgatcattgacggaaacggtcaagcatggtgggacggtctgggttcgaacggaggagtcgctaaacccaaccacttcattaccgtcaaggccatcggcaattccgtcatcaaggaccttgtgatccaaaattatcctgtccactgcttcagtatctctggcagtaacggccttgttgtgaagaatattttattggacaactcagctggcgacgcacccaacaacagatccaatggacttgccgctagtcacaattccgatggattcgatatttcaagcactgatggcatggtcctgaaggattctcgggtggtgaaccaagatgactgtgttgctattaccagtggcaacaatatcactgtttcgaacatgtactgcgatggcggtcacggtctgtcgatcggtagtgttggaggcaagagcaacaacaacgtcaccaacattcttttcgagaacagcaaggtcttgaacagtcagaatggcgcaagaatcaagtcaaattctggcacgaccggctatattgccaacatcgagtaccgtaacatccaggtctcgaacatcgacatctacggtatcgatatccagcaagactacctcaacggaggcccgactggcagcccaaccaacggagtcgttatcaagaatatcactatgtcgaacatctctggtactgcacaggccaaggccagagactactacattctctgtggcgatggcagctgctcagacttcaagttcaacaacattcacatcactggtggaaccaacaattcctgcaatatcaagcctacaggaaatttccagtgtatttag

SEQ ID NO: 2366 - DNA, 1137 bp, Aureobasidium pullulans
atgaagtcattcactcttttcacttctgctctggcagcattcgcaagcactgtcagtgccgctggtgtcaccggtgccgctgagggtttcgcaaagggcgttactggaggtggctctgctgcccctgtctacccttccaccaccgccgagctggtctcgtacttgggtgacagctcgcccagagtcatcattctcaccaaaactttcgatttccgcaacaccgaaggcactacttctgccaagggttgctccccctggggcaccggcagtctctgccaacaggctatcgacaaggacaactggtgcgagaactacgaatcctcgtcgccgaaggtttcttccctcacatacgacaaagccggtatgattggcatcactgtcaactccaacaagtccctggtcggtcagggctccaagggtatcattaaggggaagggtctacgaatggcaaacggcgtaaagaacatcattatccagaaccttgctatcactgacatcaaccctcactatgtctggggcggtgacgccatcaccttggctggtactgacatgatctggattgaccatgtcaccacacaaagaatcgcacgccagcacatcgttctcggagagtctgcctccggtagagtcaccatctccaactgtgatatcgacggtgcctcatcttggtcggccacctgtgacggacgccattactgggccctttattttactgggtcctcggatttaatcacgctaaagggaaactacatccaccacacttccggtcgttctcccaaggtccagggcaacactctcctccacgccgtcaacaactactggtacgacatcgactccaagggtcacgctttcgagcttggtcagggcggctacgttctcgctgagggcaacaagttccaaaatgtcaacaccatcattgaagctggtgctactggcaagtacttcaccgtgccctccagcggctctgcttgcagctctgtcctcggccgcagctgtgtcaacaacgccttcggtagctctggtctcttctcttccgccgacaccagcttcctcagcaacttcaagggcaagaacattgcttctgctgctgctgccagcaccgtctccactgccaacgtcggttacggtaagatctaa

SEQ ID NO: 2367 - DNA, 2700 bp, Aureobasidium pullulans
atgttggttcgtagaatagctgccattgcagcaacgctcctcccgaaagtctttgcccagaatatcatcagccttagtggccacgactggatcttgtcaaactcggacttgaacatttcctgccctgcctcattgccatctcaagctcatcttgaccttcacgcctgccaggtcatagggtcgccatactatggcctcaatgatttcaaccttcggtttgtagcctgggccaattggacatataccagtgctcccatttccaacctccaagccaattcatcttcaacatggctagtgttcaatggactggacaccttcacaagcatatcattctgcggagagcacgttgccgcaacaaacaaccagttccgtcagtactatttcgatgtctcggccatccttgacgactgccaggacgaaccagttcttagtgtcaatttcggaagtgctccaaaaataacacaggaaatcgcagacgaacctggtcaagagacatggccatacgggatcgagatcatgtatgagtttccgaacaggcaatttatgaggaaagaacagaacgattttggatgggattggggtccagcctttgctcctgcaggtccatggcaaccagcatggatagtgcaattgaacaacccagaggtctacatcaggaactctcttgtcgatatctatcgccaaggacagctaaacaacctacctccagatcagagccagccatgggttgtgaatgctagtctggactacttcggagcgattccgaatggtgcatctctacgctataccatctctactcctgacaatactactgtttcgagcgggtcgttatcaaacatcaacataacccagtctacagtgacaggatcgacagtggtcgactcttctcttttcgagctatggtggccgagtggcttgggaccacaaacactgtacaacatgaccataactctcgaggacagccggaacaacacactagcaagtgtcaacaaaaggaccggtttccgcaccattgtcctgaacgagaacccgatcagccaagcacaacttgatcaagggattgcaccaggcaacaactggcacttcgagatcaacggacatgagttctatgctaaaggctcgaacttcatcccacctgatcctttctggcctactgtcaccgaggacagaatgcgaacgcttttcgaggccgtagttgagggaaatcaaaacatgcttcgcatttggtctagtggagcctaccttcccagtttcatctatgatcttggagatgagtatggtatcctcctttggagcgagtttgagttcggagatgctctcaacgaactggaaaacttggagttggcgaacgttaacaacacagctccagaagagtatgatcgctacgtgtctgagtatgagaagctgttcctcgacactcttcttccagtagtattcggcaactctcgaagtatcagctacgcaccctctagcacaagcaatgggtggctggagctcaatttctccaacccgatccccatcgttgagcgatacaacaacctgaccgaagggtcagtatacggcgagacagatcattacaattatgatccgaccgtcgctttcaacctctcctcataccctatcggtcgtttctcaaacgaattcgggtaccactccatgccctccctccagagctggcaacaagtgatcccagaatcccagctctacttcaactcttcctacgtccagctacgcaatcgccactacccacctggcggtctaaacaccacaaactactataacagcagtcttggaatgggcgagatgacaagagctgctattgagtggtatcctgtgccaaacaagattgatagtgtggccaatttctctgcttggtgtcatactacgcaaatcttccaggcagatttctatcgctcgcagattgagttttatcgcagaggtagtggacttcctgagcgtcagttgggatctttgtattggcaacttgaggaccagtggacggcacccacctgggcaggcatcgaatatgaccgtgagcttggagctggccgctggaaagtgttgcactacattgcaaaggacgcataccaaccagtcatcatcgcaccatactataatgtcacgacaggtgatttggaggtatacgtaacctctgatctctggcaagccgtgtcaggaacagctagcttcagctggtacgactggtcaggtaatcgcctaaacatctcagcagcacccagcgcacaagtcaacgtgggcgccatcaactccacacgcgtgctttcgaccaacactttcgacatcttgaacagcactggcttcaactactcggatgtgttgctgcacatggaaacgacagtccaaggtatgatgcccaacagcaatcagagcaagacattcacacatgaaaactggttccacgcgtctccattgtcgacagcagcgatggtagatcctgggcttgagttgtcgtatttgaacagcaccaagaacttcagtataactgcgacttctggtgtggctgcttgggtgtggatagactatccagcaggcgctgtggttacttttgatagcaatggattctggttgctgccaaaccagacacgtgaagttgggtacaaagtcaaggccgactctactgagggtggatggattcaaggagtctcggtggagagtctgtacaataacacgattgcgtga

SEQ ID NO: 2368 - DNA, 1719 bp, Aureobasidium pullulans
atgtttggaggaaagatcatgctaagcagcgctgctgccttgctctcggctacaggagtgtccgcacttgtcccagttcttgacaagaggcagtacttccctgccaatgccaccggcctcaagaccatcactactcccggatcaaatgtcaccatccgttacaaggagccaggcaaggagggtgtttgcgagaccacacccggtgttaactcgtactctggatacatcgaccttgctcctgacatgcacactttcttctggttcttcgagtctaggcgtgaccctgccaacgatccgattacactctggctcaacggaggcccgggaagtgactcgttgatcggactgttccaagaacttggtccttgcaatgttacagccaacctcacaacccaggtcaacccatacagttggagcgaagtctcgaatatgctgttcctttcccagcctttcggtgttggcttcagttactctgaggaagagcaaggctcgttcaaccctgtcactggctccttccagaacgcgaccgaggccaatgcaactggtacttaccccgctatcaatgccaccgagatcgacaccaccgatcttgccgccattgctgcctggcacgttctgcaaggattccttggtgctttgcctcaactcgacgctgagattggaagcaacaaggagttcaacctctggactgaatcttatggagggcactacggaccttctttcttcaactacttcaacgaccagaacaagctcatctccaacggaaccattcctggtgtcaagcttgacttcaacactctgggtattggaaacggtatcatcgacgagtacattcaggcacctcactaccccgagtttgctgtcaacaactcttacggcatcaagtccgtcaacgatactgtctacaactacatgaagtttgccttgaacatgcccggtggctgtctcgatctggttgacagttgtcgccagtccagagagaccggccaagaaaatctggccacgcagaccatctgttctgaagcacaggatatgtgcagagataacgttgagggaccttactactccttcagtggtaggggcacatacgatatcagacaccctcgcaacgaccccactccccctgagtactttgccgattacttgaacattgctgaggtccagaacgctctcggtgttagcgtcaactacactgagtcgaataacgacatctactatgccttccaggccactggtgatttcgtctataacaacttcttgacagatcttgaggagctgctcgctcagggccttcgcatcagcttgttctacggtgacgccgactacatctgcaattggttcggtggagaagccatctcgctcgccatgaactacacccacagcaaggagttcgccgcagccggttacgaacccttcactgtggacggaaccgagtacggtgaagttcgccagtacggcaacttcagtttcctccgcatctacgacgctggtcatgaagttccgtactaccagccccaagctgcgctcgccctcttcaaccgcactcttaaccactggaacattgccgacggtactgagatggtcactgccaaccttaccagttacggctcgcccaacgctactcacactcagtcttttgtacctctgcctcctacttcgactgccagtgcttctgccactgatggtgctgatattgtacctatcggatggagatcttag

SEQ ID NO: 2369 - DNA, 2136 bp, Aureobasidium pullulans; identical to SEQ ID NO: 1982

SEQ ID NO: 2370 - DNA, 1344 bp, Aureobasidium pullulans
atgatcagatcactgaccaccttcgccctggccacagcagcctctgctttgtcactctcatcaaatggtgtacagaatggttgcatgttcagtgtccctgatgttggagacttcaatactcagattctccacgattggtcctcttcgtcaactagtgatgatgtattcaaggatcttcaggcctctacttacaccgtcgatgctggtactgctccatttgcccgtcgtttcgatatcgtcaacatcggacaagacaccaaggatccgtccatcaccttgacagtccctggtggtcagcaacatggcccagtcagttcagcacagataaccacaggttttgcggacatcctttatggatccgtacgtaccgtggccaaggtcagcaatgttcctggtaccactcatggcttctcgttctatgccaacgacacgcaagaagttgatctcgccttcttgacctccgatatctcggtcattcacttgaccaatgagcaactcactcctgatagtgaactatcatcctatcaagtcgatgcaccttctgatgctgcaactgcatggcacgagtaccgtgttgactggcttcctggcgtcaccaatttctacatcgacagcgagctggttcactcgatcgacaagaacgttcctaccaccccctcgttcttcctttggaacagttggtcaaacggcaactcctgggctgccggcccacccgcgtccaatagcgtgctgaaaatccagagcgtgaccgcctacttcaatcgtacctcagtcgcctcctctatcgccgcaaaccccggcgcttgtgtctcgaaccccttctccatcctcagcgcctactacgcagacaagaacgtgaccacttctgcccaatccgctttcatcaacggctccaacctctacatcgacacatcaagccttgacactcagcttggaggtaacccctggtctggcactgcaaagactttgaccttcctctacacctacggcaccgaaacccgtgtctttgtcgctgctcagaactcaggcacttatctcatcacacccggaggcatcgatacggcaccaggtagcgtactcgtaccttccatcaccgcacccgccaaagccaccatcgatatcatctcagtggtctggggcaaatcgcagatctctactgccagtgtatggaatgctctatacaacgactcgatcaagaaatactcattccagctacttgacgagttcttcggcatcgatacttggtggggaactcagaagactgcggtgatctggtatactgctgcggacggatcgttcaaggctgtagttggaagggaaaatgcttgggtcaagtttacttag

SEQ ID NO: 2371 - DNA, 2493 bp, Aureobasidium pullulans
atgctcagatcaagcgctttccaccctcgtataaagccccgtgcggcatgtcgcaggctgcttcatcaagcctcgccaacctttaaagacacacgcaaaggcacggctggagtcgccgccgctgtattagttgttacaggcgcatacactctgggatgtcctcgtcaagtcctctatgcggatagtcctgaaggccctgactcgcaagggtggttctcatggccagtggttgtcaaggcagtaaccccggacccgaaggagcttcccacagtgtccaaggccgaaggttatgataatgccaatcaatctcgacccggacagcaggcacctccttctcaaaccaagggtcacaagaactctgacatcagtgaggctttaaacgattccgatgtatcagcatggcacggtatgatcgagagtttcgaaacggccaaagacagcatcgtcaattttgaaatatccaagattggcgaaaaaattgctggaaccatcgtaccacgttgggtcaaagtcatgcctggttacatctctaaattgcaaaatgaactttccatggctcctgggtctttggcagaagagatctggcatgaggcaaatgatcctgagatcaatccagagatcatttgggatgcaagagtccgggtctcggacgacatctgcaaagaggagcgtgattttctgcgcaagaggaaaatccacacgactgctgctttggccaaataccttgatgtaccagagacagagattcatccggccgacgtaccaaccatcgcaatgtgcggatctggtggtggacttcgtgctctagtagccggcacgtcttcatatctctctgcacaggaagcgggattgtttgactgtgtgacttacacagcaggtgtaagtggctcctgttggcttcagactctgttctactcgtctgttggccagcagagtcacggtcgcatgatcaatcacctcaagagtcgcttgaatgttcatatcgcctatccaccagctgcactttcactgttgagtagtgcgcctacgagcaaatatctgctcagtggcgtagtagagaagatgaaaggagtacctgacgctgactttggccttgtcgatgtatacggattgctccttggcactcgtctactggttcctaagggcgaactcggtatctcggacaacgacttcaagatttccaaccagcgacaacacaccgactcgggcgcttacccgcttcccatctacactgcagtcagacatgagatccctaacgttgctcaaacacaagatcgtgctatgaatctgcaggacgaaacatccaaggccattgcaagagccgaagcatggttccagtggttcgaatggacgccttatgaattcttctgcgaggagctcggagccggaattccgacatgggctatcggtcgcaagttcgatggaggctacagcgtttacagagataatggtcttgctctgcctgaacttcgagtgcctttgctaatgggcatttggggaagcgcgttctgtgcaacgctctcccattactacaaggaagttcgcccaatcatccgcagtctcgctggcttcagcggcattgatcagctcatcgccgagaaagatgaagatctcaccaaggttcatcctttcgagcctgcatccattcctaacttcgccgcaaacatgaagagtctgctacctcaatcatgtcctgaaagtgtgcataatgtttcgactttacaactcatggacgctggtatgagcaacaacctccctatatacccactgctacgaccaggaagagacatagacgtcttgatcgccttcgacgcttccgcggatgtcagacaagacaactggatcaaggtgacagatggctatgtaaagcaacgcgggatcaagggatggccaatgggtgctggttggcctaccgaagagcttaacgaagagcaaacattgaaggagctcgagcaggctcaggctactaccgaggaggaggccaccaagagagttgaagaagcacaaaacgcagagaagtccaagcctgtcgtggaaggcggaaaggtcccagcgaagccaagtgatctcggctactgcaccgtttgggttggtacaactgaggagcgcgagaatgacaccgaaccgcccttgtcaaaacaagtcgaagaagattgggagctcatgagaccagatgccggtattgccgtcatctacttcccattcctcaagaacaaaaaggtcccaggggtagacccacagacatccgacttcatgagcacctggaactttgtttacaccgacgaggagattgacaaggttgtgtcattggctcgggcgaattttgaagagggcagagaacagacaaaacgtacaatccgagcagtttgggagagaaagaggaagcatcgtcttgatcgcgaggcagaggcaaaggagattcgacgacagacgagaatgaggaaggtgaacagatacaagcagtatggtgatcacggtgaccagttcagctga

SEQ ID NO: 2372 - DNA, 2364 bp, Aureobasidium pullulans
atgatgatatctacatgtatagcgtgtaccatactgtctgggctatgccttttaccggcagtttatgccaaagccctttgggcaactgagccagcgaacaatttcacagacatcatcaggaccgcctatccggtcggcaatggacaactagccgcactaccttttggtaatcctggacatgagaaactcagcttgaacgttgattcgctgtggagtggaggaccattcgagaattcgagctacaacggaggaaaccctcgatcttcggttgcatctgcacttccaggtatacgtgactggatcttcaagaatggcactggtaatgtaaccgctctgatgggcgatgacaacaactatgggagctatgctgttctcggaaatctgaccatctcaattgacaagatctcaaactttactgcatacaacaggtctctcgatctgaccactggtgtgtacactacgaacttcgaggccgacggcagcaagtatacgagcaaaatctattgttcgtatcccgacagtgtttgcgtatacgaagtttcttcgactggcactctgccgatcatccatatatcgtttgaaaatcagcagtctaatgcctccttggtcaactcaatatgctcgacatcatccaggaccgcatcatttgttggcatcacccaagccgagattggtatgctataccgtgctgaagccagagtcgtgggaaaatcagcttcactctcctgttcctcagggatcctaaccatcaaacccagctcgcaacaacactctctagcgttggtcgtcgctgcaggcaccaactatgcagagactaagggaacagcagctgccaactactctttcaagggctcagacccaggagattacattgccactattgcagctctggcggcagccaaaggagctagagcattgctgcagactcatgttgcagactactccgctctgtcttcacgcttcacactcagcctaccagacaccgccggatctgcaggaaagcctacagcagaactgattgcctcttaccaaggcaccgagaacataacaagcgatccatattatgaatcacttcagttcgactatggtcgtcatctgttcatctcttcgtcacgccagaattcactacccccaaatctgcaaggcaaatgggcctacggtcttcaaaatgcttggggtgccgactaccacgccaacatcaatctacaaatgaatcattggggtgtagatcaaaccggtcttggagacttgcaagaatctctgtggcgatacatggttcagacatggataccacgaggcaccgagactgcaaaactactgtacgatgcaccaggctgggttacgcatgacgagatgaatatattcggtcacaccggtatgaagacgggtgacgaatactgggcaaactatccagcttcagcagcatggatgatgctccacgtatccgatcacttcgactattctcaagacctgaaatggctgcgagaaaccggatacccacttctcgaaggtgtatctgcgttttggctcagtcagttgcaagaagatgtctctttcaaggatggcagtctggtagtgaacccctgttcatcgccagaacacgggcctacaacattcggctgtacacactatcaacaactcctccactccctcttcacaaacaccatctctgccgcaaaagcccttcacatctcttcccctctcctccccgatctcacgcatgccttgcatcatctagacaccggtctccatataaatccctccctacaaaccctgcaagaatggaaactcacagacctcgacaacacctacaacacaaactccacccaccgccatctctcccacctaatcggctggttccctggctcctcaatctccggcctcctctccggctacaccaacaccacaatctccaccttcgtccgcaacaccctcattcaacgcggcccaggcatcaccgactcaaacgccggctgggaaaaagtatggcgatcggcctgttgggcacgcttgaacgattcttcctccgcctacgacgagttgaaacttaccatttcccaaaatatcgcttctaatggtttgtccatgtattcgggcaaaaacgagccttttcaaatcgatgcgaattttgggttcgtgggggcggtgttggggatgttggtcgtggatattcagggtttggaggaggtggtgttggggcctgctgtgcctagggagtgggctggaggtagtgtaagggggctgaggattagagggggtggaagttgtgattttggatgggatgagaggggcgtggtacagggagcgaaatgcaaaggtgttaggaggagagttgtcaatgttgagggcaaggtgctttgttag

SEQ ID NO: 2373 - DNA, 1020 bp, Aureobasidium pullulans; identical to SEQ ID NO: 1986

SEQ ID NO: 2374 - DNA, 2697 bp, Aureobasidium pullulans; identical to SEQ ID NO: 1987

SEQ ID NO: 2375 - DNA, 1560 bp, Aureobasidium pullulans; identical to SEQ ID NO: 1988

SEQ ID NO: 2376 - DNA, 684 bp, Aureobasidium pullulans; identical to SEQ ID NO: 1989

SEQ ID NO: 2377 - DNA, 1329 bp, Aureobasidium pullulans; identical to SEQ ID NO: 1990

SEQ ID NO: 2378 - DNA, 1443 bp, Aureobasidium pullulans
atgcgatctcttgccatccttgctcctctttgtggcctcggccttgctgctccagctgccgagatcactcccactccggtgcctaccaatgtcaacaatggccttctaggaggtgtggtctcggacctcagcaatgtcctcgccggtgtaggcaatggtgacattgctggccaggatgcctggtcttcaatctcatatgccgtacaatcagtcaccgcgaccactacaccagtagctgcagcttcagcgatcgagtctctagcatcaatctattcggctcgtccatctgcgaacgcatttgaatatgcagcaagcttggttgccgaaggtctgacctcctctgacatgtcgagtgttttgggatcgattgacggcaacggtaccgctgacgtcaacaagcgtagtctccttgacttggacctgaccgccaacagcatgaacaataaaaaccctaaaaatcccagtcgctctgtctatccccagaaagcatgcggagatgcaccttacaccgttgacgaagcaactctcagagcagctattcacattccctcaggctttacatacggtgctaaacctcccgtcatccttatgcccggtactggaaacactggcttcgagactttccaagggaacttcatccccgctctcaaaggtcaatcgtacgcagatgccgtttggctcaatgtccctggatctcttcttgatgattcgcagaccaactctgaatatattgcctatgctatcaactacattagcggcattgcctctcgtaatgtctcagtgatcgcttggtctcaaggtaacatcaacactcaatgggctttcaaatactggccatccgctcgtcaagtcactacaactcacattgctatctcacccgactatgctggtactactatggtcccccttatctgccccgaggggctgccttgccctctcagtgtccttcagcagcggtaccttggggcctcggatttcatcacaaccttaagatctaacgacggcgactcggcttatgttcctaccacgactctctatagctccaactttgacttgattgtccagccccagcaaggtactggtgcgtctgcatatattcttgatgctcgcaatgtgggagtcaccaacaatgaggttcagacagtctgtgccggaactgtagctggcggcttctggactcacgagagtatgcttatcaactcgctcacatttgctttggccaaggatgctcttatcaacggaggccccggaagagtttctcgcattgatctcgagactgtctgcaaccaacctttgacacctggtctcggtcttgcagagctacttctcaccgaaaattccctcctcattggtcttgccaaaattatcacgacacctttgaaggccactacagaaccagctaccagagcctacgttaatgtgatgcctgcttgcgatgcttaa

SEQ ID NO: 2379 - DNA, 987 bp, Aureobasidium pullulans; identical to SEQ ID NO: 1992

SEQ ID NO: 2380 - DNA, 1746 bp, Aureobasidium pullulans; identical to SEQ ID NO: 1993

SEQ ID NO: 2381 - DNA, 945 bp, Aureobasidium pullulans
atgcgcactcaattccttttcggtgcagctcttgctgtcactgctgctgcttcacctgtcatcaagaacagagaagtcaccactgtgaccgtctccggtagcacggcaacctcatatcctcagcccgtctctgagatccaaggcttccctatccaccaatcttgcaatggtaccgagagaagacaacttgaaaaggcactcggtgataccatcaagattgcccaacaagccactcagcacatccatgctcacggcaatgactctgccctctacaccaagtactttggccaagcacctactgctgaagtaatcggctggtatgagaaactcatccacggtgaccacgaaggtgttctcttccgctgcgacgacattgacggaaactgccaccaagaaggctggggcggccactggcgcggcgaaaacgcaaccgacgagacagtaatctgccccctcagctactccacccgccaacccctcgaaaccctctgctcaggcggctacaccgtagcttccggaaaactaaaccactatttcgccgccgacttgatgcacagactcttccacaccacaaagattggcgaaggtgctgcagagcattatgctgattcatacaccgagtgtctggagttggctgaagagaaccctgctgaagctgtgagaaatacgcatacgttgcagtattttgcgctggatgtttatgctatggatgttgctctgcctggggagggatgtactggtacagttggggaagaggaggttggttcacatgctgctgcgactgcttcttcggctgcctcttctgccgtgtcttctgcttctgctagcactaccgccgctgccaccagtacttcggctcaagctgcttcccagaccgcctcgaagacgtcgagcgctgctgttgaatgccacacccacgctgacggtgtcgtgcactgcgtctaa

SEQ ID NO: 2382 - DNA, 1104 bp, Aureobasidium pullulans
atgcctaccttctcgctaccagcattgctagccttgtcctcggtggcatcagcatggccacactttggtcctcctaatcctcctcttcacccgctacctaagtcatcagcttggaacttgaagaaattcactagcttggtcgctttcggagacagctacactgacgattctcgtcttggatactttggctctcataacggcagcgcacctccagtcggatggatcagcccagcaaactaccactctgcagacggtggtcgtccttggcctcaatacgtggctcaatactccggtgctaacatctacaattacgctgtatcgggagcagtctgcagcaacaatatcactcctcgcacattctccagcatcaatgccctattccctgacattgacggctacgaacttcctgcctaccttgctgacagcaaatacgtctatcctaatggcacaaaagcattgaacgtgcctgtggactcgactgtctactccatctttattggcaccaacgaccttggcaactacgccttcatcgacgacagtcaagtcgccaacaagaccatccccgactacatcgactgcgtttacactcaattctcccgcctctacgcctccggcgccagatatttcgtccttcagaatgtttctccgctgcaattgagtcctcagtatggtttgccatctaagggtggcctgaacgctactcaatactggcctgagaagcccgcgaacacgacagaagtttctggcagaatgttggagactgtcacgacggtcaacgatgtgttcaagtatcgcacgccattcgagatcttggtgaacaagaagttccccggtgctcactttgctctgatggatatgtacggtttgattaccgatatgtacaataacccctctcagtatctcaacagcacaaaccccactgtcactggctatgtcaaccactgcaccacagctggcacaaactgcgttgctgcttccaaccctgattcgtacctctggtatgaccctttgcaccccagcgagcaggccgaccgtggctttgctaaagctttcatcgatgtggtcaatggaaacagcaaatgggccacttactactctggatag

SEQ ID NO: 2383 - DNA, 693 bp, Aureobasidium pullulans
atgtcgacacaagcgcccgcgccaacggccccgcagcagccactctcggacccgaacacaattcagatcccagagtgggactcaaacgcagtgcacacctcgaaagatggagttgcgacaacatcacaacctggagctcatcatggagggaacgcagtactacaggagaagttcaacgcagtcctcccaagatcgcgatcatattttggtctcaaaagacgcaccttcctgatcgtcgtcgcctgcgcatttcttgcattgctcgctctcattattggtctcgctgttggtttgaccaagcattcaaaaggtggacagaatctgccactcccgacaaacagcgagcagcatgaaggagatcttacctactacggtactggtctaggctcttgtggccttacatccactgacagcgacatgatcgttgctgtctctcactacgtctttgacgctgcatcaagaagttcggatccgaatcagaacccattgtgtggtctgaagctcagagcctcgagatatgatgaacaagtcggagagaggagaagcgttgatcttaaggttgttgatcgctgtgtgggatgtgccgctacggacattgatgtgtctccggctgccttcgacaagcttgcagctagagccagcggcagagtcgacgtgacttgggcatggctttctccacaggccactgcttga

SEQ ID NO: 2384 - DNA, 1323 bp, Aureobasidium pullulans
atgatgtctatccgttcgctgctcagctttggcttgttggctgcacctctggtgtctgccctgcctgctgctgattacaagtcaacttcttgcagcaccagcacttcccacagtacttcgcactcgacttctcactctacctctcattcttcaactcacacttctactcacacttccacttccacccatacttctgcccacagctcttctgcaacttctgcagttgtcaccacgaccaccagctctgcttccaacactgtgcagactacaactcttgtagctacagctactggaaagaagggtctggatacttatgccaaaaaggctggcaagctctactttggcacagcagcagatgtccctggaaccaatgagaccaccgacaagtactaccgtgccgagctcgccaacaacgcagattggggatcagtcactcccgccaatgccatgaagtgggtctttaccgagcctgaacaaggcgtcttcaactacaccgaagcagaactcttcctcgccgccgcaaaccccaacggcaagagaaaagtccgctgccacaacctgaactggtacaaccaactccccaactgggtcacttcaggcacctggacaaacgagactttgaccgctgtgctgatcaaccacgtgacccacctcgtcgagtacttcggcgaccgctgctacgcctgggatgtcgtaaacgaagccctcagcgacagcggcacgggcaacctcgccgacaacagcacctggagatcggatatctggtacaacaccatcggccccaactacgtcgccgtcgccttcaaagccgccgaagccgccgtcaaagccaacaaactgaaggtcaagctttactacaatgattacaacatcgaaagcgctggcaacaaggccactgccgctcaagctctggtcaaaagcctcaaggatgctggaatccaaatcgatggcgctggtctgcaatcccacttcatcgtcggaagcacaccttctagagctgctcaaactgcaaacatgaatgcattcgctgctctgggtgtcgatgtcgccatcactgaattagatatccgcactaccgtccctgcaaccgctgccgctcaacaacaacaagttgtcgactacgccagctctgtaggcgcttgcgcagacgttgatgcttgtgtaggcgtcacagcctgggactttgacgatgcttacagttggatcccatcaactttccctggccaaggctatggagatcttttcttccagcctggtggttatggtactcctctggtccgcaaggctgcctatgatggatgtatccagggtctcaccagctag

SEQ ID NO: 2385 - DNA, 1341 bp, Aureobasidium pullulans
atgcgttcgttttctactcttttggctttcgctgtcgctctacctgcgctggtcgcaggtgagctttccggcaaagtcggtcccaccacttcccacgccaccaaggctgcaaagaagacttgcgatatcaccaagtatggtgctgttgctgacggcaagactgatatcagtactgctctgaacagcgctttcactgcttgcaaggctggtggtgtagttgttatcccctctggcaactttgccatgagcaagtgggtcaagcttgctaacggcaataactgggctctgcaacttgatggtatcatcactcgcactggcactgatgccggtaacatgattatgattgagcatagtgataacttcgagatgttctcgtctactggaaagggtgccattcaaggtaatggctaccagatccacaagaccggcagtacatctggtccccgcctgctgcgtgtttgggacattaccaactggtctgttcacgacattaccctggtcgactctccttccttccacttctccatcgacacctgcacgaacggtgaagtttacaacatggctattcgtggtggtaacgagggcggtctcgacggcatcgacgtctggagcaacaacatctggattcacgatgtcatggtcaccaacaaagatgagtgtgtcaccgtcaaatcaccctccaagaacattcttgtcgagaacgtctactgcaactggtcaggcggttgtggcatgggttctttcggcactgatactgctgtctctgacatcacatacaagaatatctacacctggtccagcaaccaaatgttcatgctcaaatccaacggcggttcgggcacagtatccaacgtcgtcctcgagaacttcattgggcatggcaatgcgtacagcttaacgttagacgaggcatggagttcaatgaagacaattgccggcaatggtgtccaactttccaatttcaaaatttcaaactggaccggcaccgaactcaaaggcaccgcccgcggtcccatcaaagtcgcctgcgcagccaacgctccctgccacgacatttccatcactgacttcgccatgtggaccgagcaaggcagctctcaattctactcttgcgaaaacgcatatggaagtggattctgcttgaagtctggaaccagctacaagtcttatgctgctactacccagtgggtcagcagtgctcctactggatatgctgcacctactatggctgcggatttgaagacggcctttggtactacgcagagtatcccgattcctactatgcctgccagctttttccctggtgtgcagccttatactaagttggctggtagcaagtaa

SEQ ID NO: 2386 - DNA, 882 bp, Aureobasidium pullulans
atgttgaagacctttgcttcagcggctgccttgtgcactgtagcaacagcatactcgccgttccttgtcaactctctgtccactcatcaaccaatcggcaacaatgaaggtcaaacaaactactatcgtatcgcgtttgatgtttcgtcatccaacggtggagccaactcgtcggcaacctgccagacattctggggagacaattcttggacagaaccagaagcgtattcggttgcagtgccaacagggaaatggattgattgcgactcaagcgacttccggttcaagctgttcccttatttcagcattggcaacttcagtctagccatccagcagaattttaccgacatagcgatcaaggaagaaatcattgccaatggaacgacgcacatcagcaactcgacgtcttggttcaattgcaagatcaacccgattgaagtaatgtatctccagcatgcccagggcgactgcaacatggctagcaacgctagtgcctactcgatcccagtggagtctgcagaagcgtgtacctcaggcaaagccacgaccatcttcgaggtcagcggatcgtttgagaatgcgggcgagagtattctcttgattggcagtatcccagaacttggtggttgggatacgtccaaagcaattgccctctcgaatcttgatgccgagagtgccggggcaccttcgtttggaggacgcttcgatattgctgagggcacgactttcgagtacaagtatattatgcaagaagcagatggtagcagaagttgggagtgctgcgagaacagagagtttacggttccggccgactctgcatgcagcgagcagagcgtagacgttgggtggttcaggggtggggggacggctgtctacaagtag

SEQ ID NO: 2387 - DNA, 1791 bp, Aureobasidium pullulans
atgaaaagtatcagcagcaagaggtcactcttcgcagcattggcctgtgtgccatctgtggtggctgctcaatatggcaatgctaccgcatccgccaacgcttctaccatcagcttccatgatcctactggtgtttcgacaacctttgcaaccaagtcattcaattactccctggcaagcacgtactcggtccagaccgatttctcgaacgaacgactggctgctctctggcaacaagtcggcccaattgcggctgggcctgtgactacgaccgtctcgcctacccctgagtcatcacccttggcaaggccaggtgttatgcatccttacataccaagctacgaagcaaatttgagcaatgcgaaactgcctgaaaactttatttggggtgttgcttcgtctgcatatcagatcgagggtgcagcgaatgccgagggaaaaggcccatcgatctgggacttactggctcatagggtacctaatcaagtcgccgacaataccacaggtgatgtcgtagccgagcactactatctatataagcaggattttgctcgtctgaaaacactgggcgttcccgtcttcagtccttccatttcctggcctcgaatcttcccgttcggaaagggaccgatcaacgaggaaggagttcaccactacgacgacgtggttgccgagctagtcaagaacggtataaagccagccatcacacttttccattgggacacaccattggcgttgttcaacgagtacggtgcttggaccgacccacaaattgttgacgacttctttaacttcgcaacgttcatcatacaaagatacgaccagtacgtggaaacgtggttcaccatcaacgaaccgcagtattgtaactggcagtatgcttcatacccggctggaaaatactatcctgcttacaacaatgtcactggaggcctggaagcaaggttcctttgtgggcactacaccctgcttgctcatgctcgcgtagccaaatggtatcacgaggacttcaaaggccgaggtcgaatcacattcaagaattcggccaactacttcgagccaaacacaacctcgtcagctgatgcggtggctgtgcagagaaactacgactttgttcttggttggttcaatgacccagtctggaaagatggcgactacccagaaagtcttcgccagaccttaggtgacactcttcccacattcacagacgaagaaaaggcactggtgaagggttcatgtgacttcttcgccttggacggatatacgtctttctacgcctctggcatcgatgatctcgaggcttgcactagcaacagctcgtatcccggataccctgagtgtgctggctcgcagtccacagccccagatggtttccctattgggccctctgcagatgggggtgccaattggttgtacagtgctcctgttggtctccgtcgcttcctgaagaagatcacgactgagttgtttccgagtgtgcctgatattatggttaccgagtttggttttgctgaaccaggggaagcagcgctatcgtcactcaacacaattttgtgggacctaagacgcgcagactattaccagtcatacctcgacaacatccttgcgtccattcattacgatggtgttaatgtgacaggagcatttggctgggccatctttgacaactttgagtggggatctggtctcaacacacgatttggactccagtatgttaactacacgagtctcgagagaactccaaaggcaagtatgttcaccttcctgaactggttcagccagcacatttga

SEQ ID NO: 2388 - DNA, 1038 bp, Aureobasidium pullulans; identical to SEQ ID NO: 2001

SEQ ID NO: 2389 - DNA, 876 bp, Aureobasidium pullulans
atggttgctctcaagaacaccgctctcaacatgatggccatcggtgccatggctgctgtcgccaatgccgatcagtcgcttgagaagcgctacacttcatcctcttctggatctctcgtcaagggcggctgctactacagcgtccccaatgttggtcttttcaccactagaatgacctactcttgggacaacgccttcactctggctgccaccggtgtcggtgtggtccaggaccttgtttcctccctctacactgtcggtgccggcaactctccccttccccgccgcttcgacctggtcaacattggtgtctcgctccttgacccctccatcactctgaccgttcccggtggtcagaccaagggtcctatctcttctgctcagattaccactgcttacgatgacatcctttacggttccgtccgtaccgtcgccaagatctccagcgttcctggtactacccacggtttctctttctacgccaacgacactcaggagattgatttcgccttcttgaccaccagttctggtgttgcccacttgaccaacgagcaggtctctgccgatagccctgccacatcctaccaagtctcggctcctagcgatgccacttcagcctaccacgagtaccgtgttgactggcttcctggaaaggccatgttctacatcgactctaagctggtgcaaactatcactggcaacgtgcccacaagccctggcttctggttgtggaacaactggtccaacggcaacgcctgggctcaaggtcctcccgccaaggataatgtcctcaagatccgcagcatcgacggctacttcaaccgcaccagcgtcctccagacctacgccgccactcccttcggctgcaacatctaa

SEQ ID NO: 2390 - DNA, 1638 bp, Aureobasidium pullulans
atgttaaagtcattctttttggcggccgcctcttctggccttgccgctgcaatcacttgcgatgacctcgcttcttctctcaccttcaaggatgtcgatgtaatctcggcgtccagctcttactacaccaaaggctcaacgatcaacattgagggcgagcagtcaaatgcctgtttcaagcagacctacccggagatcgatatgtgcagagtcgtcttgactgtggccaccagtcctacttcacacaattacatggaggtgtggcttcccagcggcagcacaccctggaacggccgactcttgggtactcgcaacggcggtctggccggctgcatcgaatatgaggatatggcatactactctagcttaaacttcgctacagtaggagataatggcggtcacaatagctccacttctgatggttcgaagttgctgaacaacaatgaggccgtaatcgatctttcctaccgttccaggcatatttcggtcgttgccgcaaaacaagtcatcaagcagtattacagccagcctgcaagctactcttactatgttggttgcagtactggtggtcgtcaaggtctcaagtctgctcaagagttccctgacgattttgacggaattttggccggatcttctgcctctgacttcaatcacctttcggactggacttctagattcctgttgatcactgggttcggcagtgatgctagagctctatctaaagatcagtgggtctatgttcacgaagaagtccttgctcaatgcgacgagcccctggatggcgttgcagacggcattctcgaggatcccacaatctgcgagttcaacgctgctgctcttcaatgtggcaccagctccgactctcgctgtctcacccagactcaggtccagactgtcaacgacgtctactctgaactctacgaccagaacggaaacttgctctacccttctctgtctctcggagccgaattggttgcttcccagcagggtctcttcaccggctcagtcatcggcaatgccgcaaacttcatctccaacgccgtatacaatgacagcaactgggacccccgcagcctgagtcaagagacctttactagagcagatgagaccgatgtcttgcacggaaacatttcgagttggaacggcgatctcagtgccttccgcagagctggcggcaagttgatgatgtatcacggtatggcagaccctaacatcgctggcgagaactctcaacgctactaccttcacgtcgccaaaaccatgggtgccagcgacgaacaattggacgaattcttccgtttttaccgtatctctggtaacggacactgctcttcgggtggcgagggcgcttgggaatttggacagatagcagctgcacgaaacggaaaattcagtgccgtccagcagctggtggattggaccgaaaagggtatcgcccctgacaccatcaccggaaccaaattccacaacgacgaccccaaccagggtgtcgctttcgagcgcagccactgcagattcccttaccgcactacgtacaagggcaacggcctcgatcccaacgtcaccaccagctggacatgcgagaagatcaacaactggcaggagtgcggccctggtgcacttcccagactctgttaa

SEQ ID NO: 2391 - DNA, 2409 bp, Aureobasidium pullulans
atgaaaaccagtttagccgttctaggcgctgcaaccctttgtgcagcctctgtctccaacactaccaaagacggccttatcaccaatggactcgtctctcttggagattggcagagtgccttcgacaaagctcaaaactttgtctcacagcttactaccgaagagaaaatcaccatcatcggagctggatctctgaccaacacctctgcaaattggacagctctcgggatttcggatggtccacaaggagcgcagaacttctactacgaaagcgccttctcgatgacatgtgccttggctatgacttgggacaaagacgctatctacaaacaaggcaaagctgtcgctaccgagttttaccagaagggcttgcaaatgttggctgggcctgtatcaaaccccatgggcagatcagcttggggtggccgtaatggtgaatcgtttggaccagacgcctattttaacggtattctcggtggcatcagtgcaaaagcctaccaggcaggtggtgtcatcgcaggtggaaaacatttcatcctgtacgagcaagagactaatcgtacttcttccatgagcggtggtggtggtatgggaggcggcatgggcggtggccccaccggttcaggcaacagcactatgggcgcttcaacatctggctctgccccgtcaggctctgctccgtcaggaatgactctcaaagcaagagcagacaattcatccactacccaatcttcgaccgagagtgccccttactcgtccaacatagacgacaagacgtttagagagacatacctctggccttggtacgacatcatcaaggctggaactggtgcagtcatgtgcgcaatgaccgaagtcaacaacactgcagcttgtgaagatagctcactccttatgggcatgctcaaaactgatcttggcttccctggaatggtttggccggaccagaacggtcaaaaaacggctcttgggtcagccacaggaggccttgactacggttcaagcagtacctggtctacatcaactatcgaagcattcttgagcaacggctctctttcagaagcccgtctgaatgatatggttatccgcaatgttattggctactacagagccaatctggacaacggagaacagccttccaaggcagactacgatgactacgtcgataccatgtccgaccacgccaacatcattcgtgagaacggagcgaagtcaattgttcttcttaagaacgatggcgctcttcctctgaacaagcctagaagaatgacactcttcggtgccaacgccggacctgtcatgggagggcccaacctgcaattcactgttcagggctctgggccaacataccaaggccatcttgctagtgattctggctccgctcaatcttcgctaccctatctcatcactcctgaagcagctctgacgctcagagcatcgaaggaacataccaatgtcaagtggatcttaaacgacacatacagtacgagcagctcgggcaacactctggttactctatcttcctcagagactgctgtcgatgcttcttatgcgggatatgcggccgccagtgacgtatgcctcgtcttcattaatgctctatcaggcgaaggtgccgatcgaactgagttgtacaacaaggatcaggacaccatggttaacaccgtggctgccaactgcaataacaccatcgtcttcattacttccactggtatccgccttgttgaccaatggattgagaacgaaaacgttactgctgtgctatactctggtcctcttggtcaagaaagtggcaactcaatcaccgacgttctctacggcgatgttaatccctcaggtagacttatccacactatcgcaaagaacgagtcggactacaatgtagagatttgctacacctacaactgcaactacaccgagggcaactacatcgactacaagtactttgaacacagcaacaccaccgctcgttatgctttcggtcacggcttgtcgtacacttccttcggctacagtgacatcaagacgaccaagctcatgtccaacctgtcataccacgccaagggacgtcttgaagttggcggccgtgcagacttgtacgacgtcgttgcagaggtcgatgtcaatgtgcagaacaccggttcgcgtgacggagccgaagtcccacagctctacattggctacccagagggctctggggctgatcaacctctcaaggctctccgcggcttcgagcgtgtagagatcaagaaagacgaacacagccaggtcaagttccagctcagacgcagagatctctcgttctgggacgtcactgcccaggagtgggctttgccgactggtgatttcaagatttatgtcggcgcttcttccacagacattcgacagacgggtacgctggctatgtag

SEQ ID NO: 2392 - DNA, 2586 bp, Aureobasidium pullulans
atgcttctcgtggtgaatctccaggcgctgtttcttctgtgggcttgcagcgtaatcaccgtcgatgcacaatctgggactgtcaccgagagtatcaaccctgcagcgactaatgtcaccttagctcaaagctctgctcctgcagtcgccagcactctggcaggtacagtaggtaacggagctgtatcgcaacctagtctgcttgatcagatagatcaagcaatcgtccaggctgtagcagataccaaaaacgccctcaagaagattctggcaccggagttgtattactcctatggcagatcaccgcctgtttacccatctccaaatggtgttggattgggtggctggaccacggcatatgctcaggcaaaggctctcgtatctcgaatgaccaacactgagaaagccatcgtcacccttggttcttctcagaattacggttgttcaggcttcgttggacccgtgtctcgtctcggtttctctggagtttgtttgaacgacgccgagagcggagttcgcggcggcaatctggtcaacggctacccatctcagctgagcgttggtgcatcttggaacagaactctggctcacgccagagggcaagcaatcggtcgcgagttcaaggcaaaaggaatcaatgctgccctgggaccggtcgtaggtcccttgggccgcatcgctaagggcggccgcaactgggaagggtttacaaacgatccctatcttgctggtggtctggttggccccaccatcaaatcgatgcaagagtctgtcattgcggttgtcaagcactttgtcgcaaatgaacaggaaacgaaccgcaacccgttcttactcggacttattccacagctcggcaagcaagctgtgtcctcaaatctggacgaccgcaccatgcacgaactctatatgtggccattctatgacgctatcagagcagaacctggttcggtcatgtgcgcatacaatcgcatcaacggcagccacgcctgtcaaaactccaagctgatgaacggcctgctcaagacagaacttggctttcaagggttcgtagtcagtgactggggggctaaccatgcaggtatcgccagtaacaacgctggcctagacatggtcatgccacagtcatcccagttgacaccttcatcactttcctttgccgtcctcaatggatcaatcaaatcatcacgccttgacgatcaagctacgcgcatcatcgcctcgtggtatagatacgctcagattccaaacatcggcgtcgacagtaataagaacattgatgcccgtgatcctgcagcgtcgaatgttctgcttcaatcagcagtggagggtcacgtcctggtcaagaacatcaacaacgctctgcctctgagggccccttctaccttgaacctgtttggatatgatgccgttggtggtctcaatggaacttccggcttaggatctggcggtcttgccaacactcaaacttttactgatggtcggccgttcacatcattggagtacatatctttcgtcactgcgtttgcgccagactcattcaatgcacccaccgtggcactgaatggcactctcctgagtggtggtggcagtggcagtatcacccccagttcgtccacctctcctttcgatgctttcaggcgtcaagctgctatggacaacacaactcttcattacgactttgtctcctcaagcccacttgtccaagaaccaaacaaaccatgcattgtgttcatcaacgcacaatcggtcgaaggctcggaccgaagcgctctgagtgacgactactccgacaacctcgtgcgttcggttgcctctcaatgctccaatactattgtcaatattcacaacgccggtatccgcatcgttgatagctggattgatcatcccaatgtcacggccgttatcttcgcccacacacccggccaagaaagcggaaatgcattggtcgagatcatgtacggcaaacaatcgccttctggacgtcttccttacaccgtagcaaaccaggagtcagactatggatcgcttcttggcccgagctatgcagatgccaacaacccgttataccctcagtccgatttctccgaaggtctcaacattgactacaagcacttcatcaatcagggcattacacctcgctttgcctttggttacggcttgacatattcgaccttcaactattcgtccttgcaagtcacgaagcaagccggtgctatcacatcagccatgccacctgacgcagccagcagaaaccccgtacctcaaggaggtctaaactcactgtatgacattattgctaccgtcaccatccaagtggccaacacaggcaaagtcgctgctgcagaggtgggacagctctacgttggtatccctggaagcggacagccaaaagtgcttcgtgggtttgagaagcaactcattcagccaggcagctcggccacatactcgttccctctgcgtcgcagggacttgagtgtatgggatactggttctcagcagtggaggttgccctcgggcacatttgccttgaacgtcggcaagagtgttttggatattcagctccagggaacattgcagctgtag

SEQ ID NO: 2393 - DNA, 1659 bp, Aureobasidium pullulans
atgtatgtcaagacaacatccctcgcaacactcggcgtccttgccacaaaggctgcagctctagacaatggctttggccgaactccgccgatgggtttcaacacatacaaccctgcagcatgcacaatcaatcagaccttcgttcgagactccataaatgcctttgcagacaaaggatttggtgcagctggctacaatatctttggtctggactgtggatggcagggcactcagcgccagtccaacggatctatcacctatgatgctggcgctttccctgatggcattttgcctctcagcaaattggcgaacagcaaaggctttaaatggggcatgtacaccgaccaaggtgtgaacgcttgcgacacaggagttgaccgacctggatccttgaatcatgagaagcaggacgctgcccaactggcaggatggaatgtcgcatatatgaaggtcgacaactgctacatcaccgctggtgacaacgcccccaaagatcccagaacagacttcccttctcgttacggagctttctctaacgccatccaacaagtcggcatcaagggcatgcttgtttgccaatggggaacgccttactcaagccccggcggtctgcaaggtcctgctgagtggacccctccgctctcgacatcttttcgtgtcagcgacgatatcactcagggttgggcgagtgtctctcgcatctacaacgaggcgattaatgtcaatttgagaggactgaacggacccggccacttctccgatatggatctactggaggtcggcgaacctggcatgacgactgatgagcaagcatctcatttcgccatctgggccatgtttaagagccctctcatggtctccacaaggatctcgaccatgtcaagctcaacccaagcgattttgcaaaacaaaggtctgattgcaatcaatcaagattctcttggccagcctgttgtcctaactcagcgcttcactggggacaacgatcaattcgccggacctctcgccaatggtgatgtcgcagtgcttctcgtcgatcttagcaacaccaagcgtactctgggcatcaacttttctgccctgaacatttcttccgccaccgtcactgacctctggactggcaaagtagtttcgaacgcaaacaactacttcaccaccgtcaacggccacggttcagttgctttacgtttgagcaatgtcaagaagtctactcccgcagctcccaagctgacctactacgaggccgaggctggccaattcgccggcagcgcaggtgtcgcatcttgctctggatgctccggcggcaagaaggtcggcaacgtcggcaatggtaacggaaacacactcaccttcagtggtattcgcacgagccaggcgactcaagatgttcgtttcgactacatcgattgtgagattggctatgcttttagtggaggatatggtaacgtcagaggtgcgagcatcagtgtcaacggtggtgctgcacaatccgtcagcttccctttgaccggctacaactgggacaaggatatcacgaagggattcttggtcagactttcgggcttcaagacttcaggtgacaacacgatcaccatctcggggttgtcgagtgtgtcgccgtatgctcccgactttgatagaattggtgtggtggcttag

SEQ ID NO: 2394 - DNA, 2610 bp, Aureobasidium pullulans
atgcgtctgactacgttcacactggctgctgttattggctggacgctagcacaatccagtgacaatgcaattccgtttcccaatgtcacttatcccgacgccatctctccgaatccaaatgtggttttgggagctcgaaccaaccagacttccccaccaagatatcccagtccttggggcacgggggctggcgaatgggcaactgcctacgagaaggccatcgcaattgtcgagcagttgactcttgaagaaaaggtgaatttgacgactgggtccggctggcagcaagaacaatgtgttggccagaccggaggtgttcctcgtctcggtatccgtggacagtgtcttcaagattcgcctgttggcgtgagatacaccgagcgtcttgcgtatgaacgaggcaaggcaatgggtcttgaaagtcgcgacaaaggggtcactgtccagcttggacctgatgctggcgcattggggaggtctcccacagcaggtcgtaactgggaaggattcagtcctgatccttatcttactggcaagctattcgctgactcaatccgcggcatacaaagcacaggagtacaagcaagtgccaaacattacgtcggaaacgaacaagagcatttccggcaaactcccgagtctcgagactatggtttcaacatcactcagcctggatcttctaatatcgatgatcaaacacttcatgaactctatgtctggccttttgcagatgctgtcaaggctggggttgcttctgtcatgtgcagctacaatttggtcaacaattctcaagcttgccagaacagctatctgctcaaccacgtactaaagtctgagctcggcttccagggatacgtcatgagtgactggcaggccactgcgagcggtgtgcctgccattcttgccgggctagacatgaccatggctggcgacatccgttttggcgatggcctgagctacttcggccccaatatcaccattgcagttctgaatggcacagttcctcagtggcgcctggacgacatggtcgtccgtatcctggctagctggtacttggttggcggagacaccgaagtacctactcccaactttcagtcatggacgcccgatacctttggcgcggtgcacgcacatgtcggctcgacttggggtactggattggtcaaccaacatgtggatgtgcgacgtgagcatggaagattgattcgtgagatcgggggagcctcgaccgtgctcctcaaaaacacgcatggcacactgcctctgaacaacatggcaaaattgactgcggtgttcggagaagacgccggctcaaaccctctcggtccaaacggctgtcgcaatcatgcttgcgatgttggtactcttgcagttggttggggtagtggtcaagcgagctgctcctatttgatcagcccagatgcagctattcagcatgaagttgtctctcgttacggatcgtacgagtcaatcaccaacaactcagcattcactcagatcaatgctctcgctcgtcgcgtcagggatgtcgctggagtgtgcatcgtcctaacgaatgccgggtctggggaaggatttgctaacgtcgacggcaactatggtgatcgtaagaacttgaccctttggcaaggtgctgacgccgtgattgcgaatgtgtctgccacttgcaacaacactgtgctggtcattcactcggttggcgccgtcgagattgatcagtacaaggacaatccgaacatcactgcgattctctgggctggactgccaggtgaacaatcaggatatgcggttgcagatgtcttgttcggccgggtcaaccccggagcaaaattgccgttcaccatgggtcgcaacagatctgattatggcactgacgttctctacacaccaaaccaagaagtgcctcagtacaatttccaagaaggtgtctttattgactaccgtgggttcgatcaccgaaatgtcacgccagtatacgagttcggctttggattgagctataccaccttcgagtactcgggactggtcattgagaagttgaacgttgccaagtaccagccaactactggtttctctgggcctgcacccacctacggcaccatcgacaacgatacctcagctcataccttccctgggaatgttacgcgaattcctctctacgtctacccctggctcaacagcacgatcctgaacgaatcatatggtgcgacaggctttggtgatgactcttccatacctgagaacgctctgaatggcacaagtttcgagcattctccctcctctggtccgaacggcggcaatttgtacctttgggatatcttatatcatgtccgagtcaacgtgactaacaccggcaaggtggttggtgacgaagtggctcagttatatgtttctcttggtgggccttttgacccaaagatcattctccgtggcttcgagcgcgtgactattgatcctggtcagactgtgcaggtcacttttcctctggctcgcagagatttgtcgaattgggataccgtcaagcaggactgggtcattactgaacatatcaagattgtatacgctggctcatcttcaagaaatttgccgttgaatgcagtactcaagtag

SEQ ID NO: 2395 - DNA, 1725 bp, Aureobasidium pullulans
atgaaagctctttctttcttcgtcgctgccagtctgactagacttggcagcgcacaacctgcaaagcaacagaactcgaccatctacaaccccatccttcccggcttcaaccctgatccaagttgtgtatttgtcaaagaatgggacaacaccttcttctgtgcaacttcgacattcctcgccttccccggtattccaatccacgctagcaaggatctccaaaatttcagactcattggccatgctttcagcagacctgagcaacttcccgctttcggcaatatcactggtcagcagcaaggatggtacgcgccgacattgagataccacaacaagagattctggatcatcaattcttgtgttggagcggccacgggatattggagcacttccgacccatacaacaacgatgcttggacgaatgttaccccaaccgagatccctggctacgatcctgatctcttctgggatacggacggcactgtctattcggcctttgccaaaactgttcagaatgatcctttcacgactgagatccaccaggtcaacatcagcatgccctccggaaacacaactacagatcgcttcttgtggaatggaactgctgttcaacctccggaagggccgcacatgatgctcaaagatggttatcactatcttctcctcgcagaaggtggcacggcacaagctcatcaagtcaccattggtagaggcaggtctgctcaaggacctttcgaagccaacccggccaatcccatcctcactgcatacaataccagccagtacttccagacggtcggtcatgccgatctcttccaagatgctgcaggcaactggtggggtgttgcattggctactcgctccggtcctgagtacgaaacttggccgatgggcagggagaccgttctgtatcctgctaagtgggagaaaggtcaatggccagtacttggagggcctgtcaaaggcaaaatgtcaggtccgttgccaccagcaaacaggaacattcgcggcactggtgctttcatcaaggaccctgattactacaagttctcccctggctcttccattccttcgcacttcagttactggcgctttccgaagaccgagaactatgccatctcacccaaaggccacccgaacatgctgcgactcctcccttctcgctcaaatttgaccggtgatgccactgccctcccgaccgatggtatcactttcatcggccgcagacaaactgatactctttttacctacagcgtcgatgttgacttctcgccctcttctgtcggtgatgaatcaggagtcacactcttcctcacgcaggactaccacgctgatctaggtatcgtgcgtctcaacaagactggaacatacctccgctttcacgccgaaggtccaggtgccccaacagatactgttctcccaattccgcagaagtggaacaagcaagttttgacattgcagattcaagcttacaacacaacacacttctccttctctgctggaccaaaagccggtagaatgcaacagattgctactgttcctgctaccctggtatccaatgggtttactggttctttcgtcggcgtttatgctaccaacaatggtaacacaaagagcaacactccttcgtatatcagcaactgggtctatcaagggcagggacagtacattgggaatggagagttctatcctagcaacggaaagaagggtggagctggtttctag

SEQ ID NO: 2396 - DNA, 2511 bp, Aureobasidium pullulans; identical to SEQ ID NO: 2009

SEQ ID NO: 2397 - DNA, 1449 bp, Aureobasidium pullulans
atgaagatctcttcaattgctcctgtgctcgccttgatggctgcgcagagcgtcaacgcacacactctctttgccgaactctatgtcgatggccaggctcaaggcgatggcacttgcatccgcatgccctgggatcccaacactgccaccaatcccatccccagcctggacagcagcgacatggcttgcggtgttgatggcaccaagggtgtcgctcgtgtttgttcggtcgacagcggctccaccctcagcttcgagtaccgtgactggcctgacaacccatcggtcggcagcatcgacatctcccacaagggaccttgcgccgtctacctcaagaaggtctcatctgccatcgacgacgagggtaccggtgatggctggttcaagatctgggatgaaggctatgacgagtccgccggcaagtggtgcaccgaaaagctcatcgacaacaacggccacctcagcgtcaaggttcccgaaggcctccaaggtggttactaccttattcgtcccgagctgcttgccctccacaatgccgacaagggtgatcctcagttctacgctggctgcgcccaagtctggttgaactctgatggcacccagcttcctcagtcaactgtgtccatccccggctacgtcgactacaaccagcccgccaccagcttcaacatctggaatgagaagatggccctaccctatcccatgcccggtccttccgtctacactccttcatcttccgccaaggtcggcaaccagaagctgagagtctcccagcagaagcagaccgaaggtcttgctcccagcaacagcatcatcaccaacggcaactggaacggtatcgagctcgccaaatacaacgatcaggaaggctgctggaacgccagtaccgcatgctgggctcagtccaaggaatgctacgacactgctcctcctaccggtcactctggctgcaagatctgggaaggcaagtgccaagacatcaacgatcaatgcagtgccagcaactacaacggccctcccaactacatgaagaacctcaaccccgtcgtcaagcaagtcaagcttcccgccgcagaggctgctcagactggtgacggttcttattctcctgcctcttccgccgtcgccagcaagcctgccaccacgttcaagacttcggctcttgtcgccaaggccactgctgttgctcctccgtccaactccaactcgctcaccgtctctactgaaggcaactgcggcaatggcgtgacctgtaagggctcaagcttcggcgactgctgttctagccacggttattgcggctccagtgaccagtattgcagtgctggatgcaatagcgctttcggcacctgtggtggtcagtataagagagacgaacacaaccacatgcacgtccacaagcacaagcgcgctgttcgtgtcggtggcgacgccagaatgatgccatga

SEQ ID NO: 2398 - DNA, 2430 bp, Aureobasidium pullulans
atgttgtcggcttctcttctttccattgcggctctgaccgtgcccagtgctctggcagcatctcttcgtgaccagcttccgggtgtaccagcaggatggtccgtctctggtacccccgatgcttcccagtctatcactttgaagcttgcagtcaagcaacagaacatcgaccagctcgagggtctcttgaagtcggtttctgacccatcaagccctacctacggcaaatactacaccgccgaccaggtcaacgctctcttcgcaccatcaagtggctccgttgatgctgtcacatcttgggcaaagactgcaagccttgacaacagccttgaccgtggcctgcacgtcaccatcaagaccaccatcggtaacgccaacgaggtcttcggagccaacttcacaaccttcaaggacgaatctactggtgttgagaagctgagaacgctgcagtactccgttcctgacgagatctctagccacgttcacttcgtttcacctactaccttctttggacgtacgaatgcggagagtgctctcagactccccgagaatgtcggcgtcgagagacgtgagccagtttcggagccaaaatcaggcttgaccaagcgtgcccttgcttgcgtctcttactctgctcgcggaactgcctacctcggtcccgattgctggaagcaggtttacaacgttacgtatgttccagatgcctcctctggcagtcgcatcggtttcggcagtttcctgaacgaatctgccatcgaagccgacctgttcctctacgagcaaaagtatggaattcccaagcaatcattcaacgtaactctcatcaacggcggtgtcaaccaccaggagcctgagtacaccacaatcggcgaggctaacttggacgcccaaaacatcttcggcttggctcaccctctgcctgttactgagttcattactggaggctcgccacctttcctcacgaacttggaccttcccaccgaggctgacaactccaacgagccctacctcgactactacgcatacctcctgtctcaatctaacgaggctctcccccaggttatttccaactcttacggagatgacgagcagaccgtgcctatcgattatgccagatacgtctgcaaccaaattggtatgatgggtcttcgtggtatcaccattctcgagtcctctggtgacactggtgttggtgctccttgccaatccaacgatggcaagaagactccccaatttactcctgccttccctggtacttgcccttacattactgcagttggtggtactcaaggattcaatgaggaggcatgggatggcagtactggtggatttagtaactacttccctcgtgcatggtaccaggagtctgccgttgagacctaccttggttcttacatcagcaaaagtgttcaggactactacacaccattcaccaacttcagcgcccgtggtttccctgatatttcagctcacagttccaacccttactggcctgtctacgctaacggtgttcttgctctctactctggtacctctgctgctgcaccggcatgggcagcattcgccgccatgctgaacgatgcacgcttcaaggctggtcagcccgctcttggtttcgtcaaccccctcttctactccctcaagtctggtttcacggatgtcactcaaggcgctgctaccggctgtaacggtgtgaatgctcagactggtgctaagatccctggtgcatcaatcattccctgggctacttggaacgcaacagtcggttgggatcccgttactggtctcggtattcccaactttggcgtccttcttgacactctgggtctcagtgcttacaacaagactgccacgccatcgtgccccagctggaacactttggagtacataccttcgaccggcagcacctacaagatcgagtgtggtactgaccacgccggtggtgttttctcccaaatctacgtcaacggtaccgacagacttaacaactgcatcatggcctgcgagggtaccaacggctgcattgacgtccaactttccggcactacctgctacctcaagggtgctgtcggcgctgccgtctccaagcctggtgccgtcggcgcacgtctgatctcccaacccatcggcaagcacgcccagcttaccgacaagccttcttgcccaagctggaacaacaccatcctgaacgtcggcacttccaagtacttcgtcgagtgtggtgttgaccaccagggcggtgatctcaagctggcctatgtcaatagcaccatccaaggctgtgttgccgcttgcgatcagactcccggctgcatcgattcctccctatctggatcagcctgctacctcaagagcaaggttggtaaggctgttcccaactcgaatgtcttcggtacccttttgatctccaagggtaactcgaccgcttaa

SEQ ID NO: 2399 - DNA, 2967 bp, Aureobasidium pullulans
atgaaaggactcttcaagagcttgacgctctcgttaccattgagtcttgccgctctctccagcgcacaggaagctcaatggccgcttcgaagcaacggcctcactgacttggtcgagtgggaccactacagcttcaaagtcaatggggaacgtctattcatctggtcaggagagatgcactactggagaatcccagttcccgaactctgggtggatgtcttgcacaaggtcaaggctgctggtttcaatgcagtctcgttctactctcattggggataccacgctcctcgtgacggtattgtagactttgaatctggagcccacaacatcagcagcttgttcgagacatgcaaatccctgggtctatacatattctaccgccctggaccctacattaacgcagaaagtactggcggtggtttcccaggctgggtcacaactggtgcctacggatctcttcgcaacaacgacacgagatatactgaagcctggaagccctacattgagaccgtcaacggtatcattgctgagcactctattgtcaatggcggcaatgtgattttctaccaggttgagaatgagtatggttaccaatggaccaacaccgctcagagaacccccaacgagactgccattcactacatggagcttctcgagactgttgcaaacgacactggtatcaacatgcctaccgtacataataaccccaaccttagaagcaagtcttggagcatggactacgatatcaacgacgttggtggtgacacctggctttatgcagtggataactacccttcttgctggagttgcaaccttcaagagtgtagttctaccaactctcctgcccctgacttcacagtcctcgactactacactcacttccaggagactgctcctggagatccttctttcttcgctgagttccaaggtggaagctacaacccgtgggatggccccgcgggtggatgcaggaacaacactgggcctgactgggtgaacgtgttctacagaaacaacattgctcaaaaggtcactgctcataatatgtacatgctgtacgggggttacgactattctgctcctattcaagaggaccgcctgattggcgacaagtactccgagacaaaactgcttggatacttcattcgctctgctaaggaccttcctctgatcgagagaggtatcaacggcacaaacctcactacgagctccaacgtgttcacccaggtcctgtacaacgtcgagaacaatgctcagttctacgttgtcagacacgccaatactagtttgcagacttctctctccttcaagcagaacatgaccacctctcttggaaacttccaggtgcctcagcatgccgctgatatccgtatcaacggaagagagtccaagatcctcgtttccgactacaacgctggagatcagaagatcatctactctactgctgaagttctggctgtctcaatccaaaatggcaagcccatcatcgtcttctgggttcctactggcgagagcggtgaattctacctgaagggcgcgcaaaacggtaacgtcaagcaatgcaatggctgctccagtgttggcttctaccaaaccaaagatggcgtcattaccagcttcgctcagggttctggtatgagcgtcttccagtatggtaacggtgtcactgctgtcattgtggacagatcctatgcttacaagctgtggcaccctaccttgactaacgaccctcatgttcctcttgacaagactgcattggtcactggcccataccttgtccgtacagcagctgtaaagggagacactctcgcccttgtcggtgattacaacggaactactcctcttgaagtctttgctgcaggtgtcaagaaggtcactttcaacggccagagcgtctctgtcaaggcctcggcctacggcagtctgaagggagagctttctcacgacaaagttactgttcagtcgctgaatgccgcactccctaagttgtcgcaatggaaggttgctgatggtcttcctgagcgtgaggccagttacgacgactcaaagtgggtcaatgccaaccacactaccacacctcactggaataagcctgccaccgaccacattctttatgccgacgagtacggtttccatggcggtaacctcctctggcgtggacgcttcaatggcacaagtagtggtgctttcatcaatgtcattggtggtactggtagtggttggtctgcttggctgaacggcaagtttgtcggatcaacattcggtgacatcaagctctcccagaccaatcagactctcaagtttggtgatgcagtcaaagctggagagaatgttcttctcgtcatccaagaccacatgggcaaggaccagactactggtgccatcaatcctcgaggtatcctcaacgccactttgaccgacggtgcgaagttctcttcgtggaaggtcgctggtaaggccggtggtggtgccaacatcgaccccgttcgtggtccttacaacgaaggtggtcttcacgctgagcgtctcggctggcatttgcccggcttcgacgacagcaagtgggcttctggctctccttctactggcctcagcactgcaggtgccaacttctaccgcaccacacttcctcttgatctgcccgagggacatgatgtctcattggctttcaaccttcacgcgaccaagagtaagaagctcagagctcaactctatgtcaacggttaccaatttggcaagtttgttccatacattggtaaccaggttgagttccctgtcttccctggtatcttgaactatcatggcaacaacactattggtctgtcgatttggtctcaggacaatgttgaggcaagcgtttccgttgatgtcagtgttcttggtgtgcactcttcaggcttcgatgtcgggtttgattcaacctaccttagacctggatggacgaacgagagactgcaatactattag

SEQ ID NO: 2400 - DNA, 1542 bp, Aureobasidium pullulans
atgaagtactcatctgtcctcgcggctttgtccgctgttggtagtgctctcgcacaacagacatataccaaccctgttctttggtatgatcttgcagacattgatgtcttccgcaagggaaaccaatactactattcggcttcaaccatgtcgttctcacctggagctcccattctcagatctggtgaccttgtcaactgggagtttatcggacactctgtcccgagacttgacttcaaggacactgcctatgatttggccgatggcaagcaagcctacgtccgcggtatttgggcttcctccatgcagtaccgtgagtatgataacactttctactggattggctgtgtcgacttcaagactacctatatctacaaggccagtgatcctgctggtacttggagcaaggttggcgagatcggtacttgctactatgactgcggcatgctgtttgacggtcagaacatctacgttgcttacggcaacaccaagatcagtgtagctcaactgaacaacgactttacccaaaagtccaccacccaagtctactcttccagcatcacgatcgaaggctcccacatgaagaaaatcaacaaccgctactacatcttcgtcacccaacccgcctccaacgaatacgtcctaaaatctaactctggccccctcggcccttacgaattcaagatcttcacaaaggctccagccagtggaattcaaggctctggaagcccgcatcaaggctccgtcgtcgatacacctaatggagattggtactatttgtcattcatcgatgcgtatccgggaggccgcagccctgcccttgcgcctttcgtcttcgactctcaaggctggccatctctggaagcaacaaatggtttcgcaatagaaaacccctaccccgtaacccccgtaccagtaaaatccaccaccggcaccgatactttttcctctggcaaactaggcccgcaatgggaatggaaccacaacccggatacgtcaaaattctccttcgccgctggaggtggattggtgttgaaaacagcttccgtgaccaaagatctctaccatgccaaaaacaccttgacgcatcgtatcttgggcccagacagtacagcgaccatccaactagatatcttacaaatgacatccaccgaccaagcaggcctatccctcttccgcgacaattccgcctacatcggcatacgcaatggcgttgtaatcctccaacgcgacatcaccatgggagcagcatggaacaccctctccaccggccgcctcgaaacctccgcctccctacccgcgaaaacgacaaatgtgtggttacgtctacacgctgatatcaaacccgctggaacccatcagggtgttttcagctacagcactgatgggaagagttttaagcagttgggtacgccgtatacgatgaatacgacttattacttttttatcgggtataggtttggtattttcaatttcgctgagcaagggttgggtgggagtgtggtggttaagtcttttgatttggctttgggtgcgaagtga

SEQ ID NO: 2401 - DNA, 759 bp, Aureobasidium pullulans
atgctcagcacaatcattcccctggctcttgccctcgtgggtcaagttgctggccagaccgtatacttgaccggagactcgaccacagctcctggaggtggtggtaaaggcacagaaggctggggccaatacttgcactactcgatgaagatcccggtcgtcaacaaggcctttgctggacgttctgctcgcagctttactcgtgaaggtcgtttcgacgaggttggcaagctcatcacaaagggagactttgtggtcatcgagttcggtcacaatgatggagccagctcacctgataatggccgttccgattgccccggcagtggcaccgagacttgccaatacacctacaacggcgtcaccgagaccgtccacaccttcccctactacctcgagcaagcagcaaaatcctacgtagcaaagggcgcccacgtaataatctcctcccaaacccccaacaaccccgacgaatccggcgtcttcgtctccacccctccccgcttcgtcgccctagcaaagaccgccgccacaaatgcaaaggtggattatgttgatcacaacgcttattctttcgcggcgtacaagcctttgcccgtgtcgactgtcaacagctatttccccaatgatcatacgcacacggcgcccaagggtgcggatttggttgctcaggcttttgttaggggactggtttgtggtggatcgttgttgagcaattatgtcaagaatgctactgcttcgattgagggatcttgcctgtga

SEQ ID NO: 2402 - DNA, 762 bp, Aureobasidium pullulans
atgcgtttcagcacttccgccattattgccgcctccctctctctggctgctgccgagagaatgggtccccttcgcactcgtgcctctggcagcttccccatccctgccagtcagggttccgtcacctacgatgacgccaagaccatctccggatccttcgatggtggttataagacctacggccgtggtgttgagtgcggtggtcaggctgagggccagaacggtgatgccgtcttcgtcctcgaggacggtgctaccctcaagaacgccatcattggcaaggaccagaacgagggtgtccactgtctcggtgcctgcaccattgagaacgtctggtgggacgctgtctgtgaggacgctcttaccttcaagggtaacggtgacggcaaggtcatcggtggtggtgctcgcaacgccgaggacaaggttatccagcacaacggtgttggttccatctccatcgacggcttcactgtccaggacttcggcaagctctaccgctcttgcggtaactgcaagcagaatggcgatgccagaaaggtgaccatcaccaacgtcaaggccaccaacggcaagtaccttgttggtattaactcgaactacggagattctgccactatcacaaagacctgtgcttcttctgtcaagcacatctgccaagaatacaagggtactagcaacaatgacgaggagccttctactctttctgagggtccctccgatgcctgcatctaccaggagtctgacgtcgaggcttgctaa

SEQ ID NO: 2403 - DNA, 1365 bp, Aureobasidium pullulans; identical to SEQ ID NO: 2016

SEQ ID NO: 2404 - DNA, 1728 bp, Aureobasidium pullulans
atgcatttcaacagcctcgctttggcgacattggcccttgtgccatcctttatcgaagctcacggtgatgtccctggagctcccagagtttttggcagaagatcagctctgagtggtgccagaagagcccgtaatgtagcaagcagctaccaaccaattgtgcccgaggttcatgaaaagcgtcaagcttctaccaacaccgaaggccagtgtggacaaggcttcggatcttgtgctgatggttactgctgttctgaagccggctggtgtggtcaaggaagcgattattgtgctgcacctggatgtcagttcaactttggaccagcttgcgatgacaacacgattccatctggcagcagcacttctaccgttgctagaactaagctcggtaacgtactctatggtggagctggtatctacgattgcacagtggcaggaaccattgccattacttatgatgacggtccttatatctataccgaacatatcctggatgtgttaaagcagtactcggccaaggccaccttcttcatcaccggcaacaacaatggcaagggagagatcgataacgctgcctatccctgggctgctaccatcaagcgtgcttacgctgaaggccaccagatcgcatctcatacttggactcacccacatctttccaacatcaccagcgcccagagaaaacagaacatgtacagcaacgagatggcattgcgcaacatcttgggtttcttccccacttacatgagacctccttactccgactgcactgcagaatctggatgtcaacaggacatggccgaccttggttaccatattacctactttgacgtagatactgatgattacaacaacgactctcctgcgcttattcaaaacgcaaagaacaacttcgatgctggaattgctggaggaaagcctgcgaccaatgactaccttgtgattggacacgacatccacaatcagactgcaaacgttctgactgcatacatgcttgacaaaattctggctcttggttacaaagcagtaactgtcggcgaatgtctgggtgatcccgaagagaactggtaccgcaagtcatccggtagtgtcttcacctcttcaacatccgccgtaacttctgctaccaagacctctgccaccattgctcccactgctacatctaatgacggcacttgcggaggtggttcaggattcatgtgtactggctcagagtttggtgactgctgctcgcaggctggttggtgtggatcaggaactctctactgtggcgaaggatgtcaagcaggattcggtcagtgcggtatcaatgttcctcaaagcagcagcacaacctcgactgctcctgctgcaaccgcaactggcgtttcgaccgatgcaacctgtggtggctcaagtggcatgacttgccagggctcggtctttggtaactgctgttcgccagcaggatggtgtggtagtactgctgcctactgcggtgacggatgccagtctggcttcggctcgtgtggtgattctggtgcggcagcaggtgctgttcaagctaccaacaatgccgctgtatcctcgacactcgctacgtcggccaccagcaaggtagttactaccactaccgccgccacagcaaccaaaacgtcgacagctgctaaggctaccgctactaacaagtcaagagtttcgacatgggtcaacagctggcttagcaaactgagatctggatctcactaa

SEQ ID NO: 2405 - DNA, 1968 bp, Aureobasidium pullulans
atgaagtccgtagctaaactttcggccacggctctgtggagttccgcagtcgcccttgcctggaggccgcaatatggtagccctgtcaaagcagagtatggcaacctcgtcaaagctcacgcttctcaagactggaatggttctgcgactcagaatgcaccatggccattctctacctctcacccttggtctcctagtggttcactcccccaaaacatcaccaatggcctcagcacttttggcaccatcaatcatccggacctgggaccatggactgatggacctcttccacaaggctgtccttggggtctgcgtcagtcgaacgatactaacccctacaatgagaagaatgtccccaacactggtatgactcgctactacgagtgggaaatctcgaatcgaaccatggctccggatggcgtcgcgctgccgcttcttgttgtcaatggacagttccctggacctctcatcgaggcgaactggggtgactggatcgaggttagaatcacaaacaatctcaacgagggtaccgccatgcactggcacggtttcctccagaaaggcactccctggtatgatggtactcctggtgtttcgcagtgtccaattgctcccggcaaatcgttcacttaccgcttccgtgccgaactttacggcactagttggtggcattctcactggagtgctcaatacttaaacggcttggctggtcccattgtgattcacggacctgtagccgatgagtacgatgttgaccttggtccagttatgttgaccgactggttccatgcagactactacagcttggtcgagcaagttttcattgccacagaattcggacccatcttccctcccatggcaaacaacatgctcatcaacggaaagaacaactacgattgcaagaacacaaatctcacctgcactcccaatgcaggagtttctcaattccgcttccaaagcggtaagaagcatctcttgcgtctcgtcaaccacgcggctgaggctgtcattttcttctcaattgatggctatcaactcaaggttgtggctaatgactttgtccctgtcgagccttactatactgatctggtgaccctcgctgttggccagcgtactgacatcatcgtcgaagccactggaaacagcactgatgccgtctggatgcgcatgactgaaggcccttccgggcttggacctcctcgtggtcagactggttgcagtttgaacgacggcaacagtgttgaagcacttgcagctatctactacgagaatgccgatatcagcaagcctcccaccacgtcaaacacgattgatgtgtcccgcacatacttccccctgaactgcaacaaccagcctctcaacctcaccgttcccaagtatgccatccctgtcaaggagcccgatgtcgttctcaactttaccatgtctgcggcctacaattcaagcggagccttcaagtggtacatgaacaacgagacatacatggccaactacaacgatcctactttgttcgaggctaagctcggtaaccttgacttccctgaggagtcgcgtgtcttcgacttgggaaccaatggcactgttcgtatcattatgcaaagcgtcggcttccctgcttctcatcctatgcacatccacggcttcaacatgcagatcctgagcgagggcattggaacttgggacggcgtctcaatcaccaatcccgaaaatcctcagcgtcgtgatactcaactcgttcagcccaacggttatctcgtcattcagatcgagctggacaaccccggagtttggcctttccactgccacatcgcatggcatatctcggaaggcatgaacatcaacctcctggtaaacacgccatatgtcgtcaacgaaatggagatcccgtacgtgatggcacagacatgccgtgactggtcagactacagcggtaccactgtcgtcaaccagattgattctggtctgtag

SEQ ID NO: 2406 - DNA, 1167 bp, Aureobasidium pullulans
atgatttcaactaatctctggacacttcttgcgttggcgactcccatagtgtcagcaggtggtggtgtgcattactccactcatggaaaacgacctcaatgcacagtactcgccaatggaggctccaccaacgacgttcccaacattctcaaagcatttagcaaatgtggaaacggaggcgacatcatcttcccagaaaaccaaaactactacattgcttcaaagttgaatcctgttgtaaacgatgtcaatattgattggcagggcatttggactttttctcccgatattgagtattggagacagaatagctctacctatccgatcgctttccagaatcatgctgcctcgttcatcttgacgggcgatcacattcgcattaacggatatggaacaggaggcatcttcggaaatggtgatacctggtatactgcggaggctggacataccgtacccggcagaccaatgccaatggtcttctggaacgtctcggatgtgacagtaaagaagttcttcgtcaaggatccacctctgtggagtttcaacatcatgaatggcacagacatgtggattgacgagttatactgcaacgccaccgcaacacaagcaaacgcaagtcagaattgggtgcagaacaccgatggatttgatacgatggactcgaagaacatccgtctcaccaacttcgtataccaaggtggtgacgactgcattgccatcaagcccagatcttacaatatcttcgtccaaaatgcaacctgcagaggaggcaacggcatggccattggcagcgtagggcaatacctcgaggacaacactgtcgagaacgtaatcgtggatgatatcatccgctggaacgaagatatgcacggctccgtcctgattaagacctgggtcggcgccctggtcccacagaacccgtccgcaaacggctactacgaaaatgcaggcctccctcgcggtggcggctggggatccgtccgtaacatccacttctcaaactttgtcgtccaaggcgcagatgcaggtcccaccatcgatcagaactcgggcaacaatggcagttttgcgggtaccagcttgatggatataagcaatattgcttttaccaacttcactggctggttgtctggcaaggagtccaaaaatcggacggcaagtttgtag

SEQ ID NO: 2407 - DNA, 1254 bp, Aureobasidium pullulans
atgctgagcaaagcattactatcctctgcccttgcggcacttactctgctaccatctgctagtgtagcagcgccattagaacaattcaagcgcgacctcaaattcaactttggcaatgacaaagtccgtggtgttaaccttggtggctggttcgtgctcgagccttggatcacccctagcatcttcgacgcaacaccagataatgtagtagacgaatacacctattgcgagaccctcggctccgatgaagcatactcgagactatcaaagcactgggactcctggatcaccgaagatgacctgcaccagatcgctgctgcaggcatgaaccacgtccgtattcctgttggctactggtcggtgatcaaagacgacaacgcaccctacgtccagggcgcatacgaattcctcggtagagcattggactgggctagcggtgcaggactcaaggtcatgattgacctccacggtgctccttattcccaaaacggattcgataactctggtaaaagaggaggtactggctggggccaaggcgactcggtcagcagaaccatcactgctctcaacaagatccgcgacgatatggctagccaccctgcggtctcggctatcgagcttctcaatgaacctatgggctcctccgtcggtatggacactgttcgccaattctacatggatggctggggcaacctcaagaacagtgatgttgctatcaccttccacgatgcattcgccggtgttacttcctggaatgactggggcagtggcatgtggaacttgctgctcgacacccaccactacgaagtgtttgatgctggcgcactgagcatggatatcggctctcacatcggaactgcttgtggcttcggtggctcaatggctaccaacaacaaatggaccatctcaggagaatggaccggagctcttactgattgcgcacgctggcttaatggtagaggcgttggagcaagatatgatggaacatacaactacaatggtgcctcctcgtactacattggcagttgtgacggaaaatactccggaacagtcagcggactcgacagcacctacagagacaacattggcaagttcatcgaagctcagcttgacgcttacgagaaggctgccggctggatcttctggacatggaagactgagggtgcacccgaatgggacatgcaggcactgctgcagaacggagtcttccccaatcccgtcaccaaccgaaaccaccctggccaatgcaactaa

SEQ ID NO: 2408 - DNA, 1581 bp, Aureobasidium pullulans; identical to SEQ ID NO: 2021

SEQ ID NO: 2409 - DNA, 1656 bp, Aureobasidium pullulans
atgggactctcagtactcgctctttcgctcgcagcgttgcctttcgtagcagctggaggtccgttcttgcaacagacaagcaacaacacttggattatcggcaatgacctctggaatatcactcaaggatccatctatggcaccaagctatactatcaaggcaaagatgctattggcaaagctgctgggcattatgtcggggctgatggagaaaacaaccttgtctgggagtcagcaagtattgtcaatgaaggcaacgactttattgatgtgagctttgtctctgagaaaggcgatctccactgggtgatctacgatggtcttgctggctcgtatcagtatttcgtcaaccgtgctctgggcgacatcagcatcctccgctcgcttttccgccttgaccctgataggttccctaacggacgcacctacctcaaggatgagcctctgccttctttccaatccatccttgatggaaccaaggttcaagatgagacttttgagacgtcggatggaacatacatcacgaagtatgattggtctaactacgtgagggaccgcgacttcaacggcgttcatggcccatctactggatcttggtatatccatcccagcacggactatttcagcggcaatcacctcaagcagaccctgactgttcatcgcgaaagtagcactggagatgccgtacaactcaatgtagtacaagacacttcacacttccagactcaggtcacgaccactcaaccaagtggtaagatctggggaccatggctatggtatctgaatgatggctctatcaccgatgcgaaacagagattccaaaccgagctagcaaagtggccttattcatgggtcaatgatacagcttaccattctcgcggcgctgtctcaggaactctcaagctctccgatggacgtgttgctgctggtgccgctgttttccttggcgactctgacaataaagctccattggctcaaggtgtgaactactattacacttcgtacgcagatgcatctggaaagttcagcttctcgaatgttcgtacaggtcagtatggcttatatgcttggtccaatggtggcaaaattggcgacgtctacaccaattatacaaaatctggtatcaatgtagagggcaacaccaaactgtcaacactgacctggtccgtcccaagcaacaagcgtatcttccagattggagactttgacaagaagaccactggcttcattcaaagtggaccgtatcaccacggtcttgctgctcagtcacctgccaacttcacttacactgtgggcaaatcaaacagctctgactggtactacgcatcctccaatcttggcacctggaatgtagagtttgacatcgccacacttgaaaagtcgtctgcacgcctgattatctctctggctggctactctcagagcactgctttgacaatctcatcgaacggagctgtcttgggaagcttgagcaaggataatgtcacgactgatgccgcaatttacagatcaggtactgtaagcggagagtggcatcaattcgtgtacactgtcagcaacttgaagcaaggaaagaacgtcatcagcttcaccgtcaatagatatgttctatggagaggcttcttgtgggatgccatcgctcttgagtgggcttga

SEQ ID NO: 2410 - DNA, 681 bp, Aureobasidium pullulans
atgaagtccgcaatcgccgctattcctcttctcctcgtgggctcttccatggctgctcctcttgagaagcgtgcttgccccaacattcacatcttcggtgctcgcgagaccactgcacctgctggttatggatcagccggtactgtcgtcaacctcatcctcaatgcacaccctggctccaccgccgaagtcatcaactaccccgccgctggtggcgatagctatgcctcgtctgtccaagctggtgtcaaggctgtcaccaaccaaatcaacagctttgctgcttcatgccccaacacacagctggtctacgtcggatactcccaaggtgcccagatcggcgatgacgctctctgcggtggcggcgaccccaaccaaggcatttccagcactgctgcaactatttccagctccgtcggaagcaagatcaaggccgtcatcttcatgggcgacccaagacaaatccccggtgcttcctacagtgtcggaacctccaagaatcctggtttcgatcccagaccttctggtttcacttgctccgcatatgcaagcagaatccaggcttactgcgatgctgccgacccatactgctctaacggaaacaatgccgccactcaccaaggctatggttccgagtacggtcaagctgctctcaagtttgtcaacagcaagctcacctaa

SEQ ID NO: 2411 - DNA, 1524 bp, Aureobasidium pullulans
atggctattcttcgtgcttgtactactcttgcatgtgttgctgccgttgcttcggctagacaacttcctatcgttgctgctgatgattatccgtccactccttcatatccagtgtatactggaccgtcttacaacaccaccaatggaaccaatggcaccaccatcgacaccaagaaacttcaagcagacattgacatcaccaagttggttgcccgtgcagaagcactagccaaaattgcagacctcagtcttcctgagtacaaccaccctaccagagtcattggtagcaagggtcacgtcggaactgtcgactacatctactcagaaatcgccaagctcggcgattactacaacattaccaatcagacattccctgctgtcactggtaacattttcgaggagcgtttggtcatcggacatgatgtccccaaatcagcgtcagctatgagcctgacacctgctactaaaggccacgaacctgtctacgggcaacttctcttggtaccaaacggaggctgctctgctggtgacttccctgtcaacatgactggtgccattgccttcatcaagcgtggtacctgttctttcggtgacaagtcagccaatgctggcagagctggagcagatgccgccgtcatctataacaacgctgaaggtgatctttcgggaacccttggctcgccttcgcccaaccatgtggctacttttggtatctccgccgaggaggcagctccctatgttgcaagacttcagaacggcaccaagcttgatgcgattgcctacatagatgctactgtcgacgagatcgaaactaccaacgtcattgcccaaaccacagctggtgacccagagaactgtgtcatgcttggtggccatagcgacagcgtggctcccggtcccggcatcaacgatgacggttctggaaccatttctctccttgaggttgccactcaactcacaaagtacgaggtcaacaactgtgtccgcttcgcttggtgggcaggcgaagaagaaggtctgcttggatcaacctattacgccgagaacctcagcgaggaagaaaaccagaaggtccgcctcttcatggactatgaaaaccctgtcggctctggtgagctccgtattctttacgaagactggtacaaggagcaaggtttgccttacacttacattgccttcgatggcagaagtgattatgccggcttccttgacaacggtattcccagtggtggtattgctactggtgctgagggtgtcaagactgctgaggaggctgcccttttcggtggcgtggctggagcatggtacgacccttgctaccaccagctttgcgatgatatcaccaacctcaacttgactgcttgggaggtcaacaccaagctcatcgctcactctgtcgccacctacgcaaagtcctttgacggcttccctaagcgcacaccggagattgaggagagatcactctcgagctcaaagaagaacaagcctcttttcaagtacaagggcaacgaccttgttatgtga

SEQ ID NO: 2412 - DNA, 966 bp, Aureobasidium pullulans
atgaagttcactccttccttcgccctggcggcgcttacttccctggctgttgccgctcctcatgacattgtcaacaagagagctgttgcctctggccctgtcggatatgcctctaccaatggaggtaccactggtggccaaggtggagctaccactactgtctcaaccctcgcccaattcaccaaggctgctactgcaaaggagcctaccgtcgtctacatctctggcaagatcactggtaatgacaaggtcagagtttcttccgacacttccatcatcggtctgaacagcgactctgctctcgagaacatcggtctcttcgtcaacaaggtcgagaacgtcattcttcgcaacttcaagagcagcaaggttctggccaaaaacggtgatgctatcggtatccaggcctccaagaatgtttgggccgaccaccttgacctttcttccgaccttgaccacggcaaggactactatgatggtcttcttgatgtcacccacgcttccgagtgggtcaccatctccaacgtcttcttccacgaccactacaagtgctcccttgtcggccactctgacaacaacgccgctgaagacactggccacctccacgtcacctacgccaacaactacttctccaacgtctcttcccgtcttccttccatccgcttcggtaccggtcacatcttcaacaactactacgagaacgttctctcttccgctgtcgacactcgtgatggtgctcaggttctcgtcgagtccaatgtcttcgtcaaggccaagaagcctgttgcctctctctactctgatgaccaaggttacgctgttgtcaaggacaatgactttggtggtgagaagaacgaggctcctgctggcactctcactaaggttccttacacctacactgctcttggtagcgccaaggtcaaggctgccgttgttggtactgctggtaacaccctcaagttctaa

SEQ ID NO: 2413 - DNA, 2226 bp, Aureobasidium pullulans; identical to SEQ ID NO: 2026

SEQ ID NO: 2414 - DNA, 1248 bp, Aureobasidium pullulans
atgtggaagaagagtgttgctattctcagcgccattgccggcctggcaatggctgctcccctacctcaggatgctgctgccgctcctgctaccaccaagtacatcatcaccctcaaggctggcattgacccggaagttggcatctctcacatcaactgggccggtgacctccaccgccgtggtatctacaagcgccaggagaatggcactgttgaggaggatttgaaggtcttcaaggttgccgacttcaacgcctacgctggttcctttgacgaggagaccattgctgagctcaaggctagcaacgaggtcgctgttgttgaggaggatctccccatctacatgactgccattacctcacagactggcagcacctggggtcttggccgcatctcgcaacgcacctacactgccaacacctactactacgacaccactgctggtgccggtacttacggctatgtgatcgactctggtatcaacatcaaccaccaacagttcggtggtcgtgcctctcttggtagcaacttcgttggtggctctcacatcgacgacgctggtcacggtacccacgttgctggcactattgctggttccacgtacggtgttgccaagaaggccaatgtcatctccgtgaaggtcttcggtgcttctggatccagtgccacctccaccatcatgcagggctttgaatgggctgtaaacgacatcatcaacaagggtcgtgccggcaaggccgtgatcaacatgtctctcggttctgaggactcagtctccaccgccttcaactccctcgtcaacgccgccacccaacaaggtgtcctctccgtggtcgcagccggcaacggtatcagcaacccccaaacaggtgccttcatcgaagccatcgatgcctcacgcacctcccccgcctccgcatcttcagccctcaccgtcggcgccataggcagcaacaacgcccgcgcctacttctccaacttcggcagcaccgtcgatgtcttcgctcctggccttaacgtcttgtcttcgtggatcggctccaacactgctaccaacactatctccggtacctctatggcttgcccccatgttgttggtcttgctctttacctcaagggtctggagtccggtcttaccacccctgctgccaccaccaacagaatcattgctcttgccactactggccagggcactgatctccgcactggcagccccaaccgcattgtctacaacaacagcggtcgttaa

SEQ ID NO: 2415 - DNA, 1005 bp, Aureobasidium pullulans
atgaagttcaactcgcttctttggctcagcaatctcgcgttggtgcaggcaaaccctttctggaaggatgacttttccctccaaggtttcgcaaaagataaccctctgggcgaaaccaccggtggcaaaggcggccgcacaaccaccgtgtccagcttgcccgctctccgtaccgctcttgctggcaccaatccgttgatcgtagtggccaagggctctttcaacttgaccggcgagacacgccttcggatcggcagcaacaagtccctgctcggtcacaagaacggtgcaaagttcttcggtggtggtatgtctgctgtcaatcagaccaacatcatcatccgcaacattcaaatcagctacgctttcgacaacgactgcatcacccttcaaaacaccactcgcgcatggatcgaccacaacgagttcttctcggacctcgaacacggccccgacttttacgatggccaagtcgatctcgtccgagccacagactgggtgactgtgtcctggaactatttccacgaccactggaagtcctcactcatcggcaacagcgatgtcctccgcgaagtagacgaaggccacctccacataacctaccaccacaactactggcgcaatatcggcacccgcggcccagccggccgcttcggccaccaacacatctacaacaacctctaccgcgaccacctataccaagccatccactcacgcagcgacaaccaaatgctagtcgaaggaaacgtattccgcggaaacacgcgtgaagcggtttcaacctatggtcttgtaatcccagaagattcaccgaatacctgcgtctgtggtgattttgaaattgatggatatgtgaattttggggcgaggaatgattttgggaaggcgggggttaatgttacgcagtggggggatttcaagagggcgccttataggtatgatttgactagattgtcggatgtggagaaagttgttaccaggggtgttggtattggtaagatttga

SEQ ID NO: 2416 - DNA, 1194 bp, Aureobasidium pullulans
atgctttcttctcccatccttgcgcttgctctaagctttgtggtcgggcagtctcttgctcttcccgctgctgttgcaccacccagcaccaactacatcaactggaagaccttcaaagccaacggcgtcaacctcggtggctggcttgtccaagaatcaaccatcgataccgccttctggaatcagtattccggcggtgctcccgatgaatggggtctttgcgtcaacctgggatctcaatgcggtcccgtgctggagaagagatatgcatcttggatcacaacctccgacatcgacaaactcgccgcagcaaacataacccttcttcgcatccccaccacctatgccgcttggatcaaagttcccggcagtcagctgtactctggtaatcaactttcttttctcaaaactatatcaagctatgcaatcaacaagtacaacatgcacatcatcatcgacatccactctcttcccggcggagtaaacggcatgccttttggagaaaaagaaggaaatttcggctggttcaacaacgcgaccgccttgacttattcctatcaagccgtggatgccgccatcaacttcatccaaacctcaaactttccatcgcatttcaccctcgaacccatcaatgaacctgtggataataagaatatccaattcttcggcacacctctcgctctttctgatactggtgcagcgtgggtgacttcttacatcaaaggtgtcatttctcgtgtcgctgccgtcaactccaagattcctgttatgcttcaagatggctttaaaggtgaaacttacttctcgtcttcgtttcctgcaaccgccaatttggtctttgatatacacaattattatttcgcgggtagaggtgccacttcggccaatgaagccgcacttatctgttcggatgccaaggcctccgccggtgatggcaaattccctacttttgtcggtgaatggagtattcaagcagaactcaacaacactttcacactgagagaaaagaacttactcacgggcttatacgcattcaacaaatacacctccggctctgcatattggaccgccaaattcttgggtacggctaaagtggatggtcaaggtactcagcaggattattggaattatggcacttttgttgaccttgggtacacgaagaatgtgggcaggggtgctgtgtattgtgcttga

SEQ ID NO: 2417 - DNA, 1734 bp, Aureobasidium pullulans
atgctcgcacttcttctcccgaatgtcatagctgcacctacgtccaacacggcagcatatgcaatcaaagaaagacacgctgcaccactaggctggacgaggatgtcgtctcctgccgactctcaaatcatcaaccttcaaattgctctgagacaggaaaactccgacgccctcaccaagatcgccatggaagtctctgatccatctcatccacgctacggccaacacctttccgcaaagcaactgctgggacaaggtatcgatactgccatactcagccccacccgagactggatcactgtggatctgcctgttcgcaaggtcgagagtctcttgaaaaccacatactctaattatcgtcacacggacagctcgacattgatgcgcacttccgaatggtcgctgcccgaatctctacatgagaatatcgacctgattcaaccgactacctccttctttcgaactgtcaagccatcaatccgtcaggatcttcaccatggtcccatgagatggcatcagggtgccgaagttctggagccgggttggaactatggctcgaatggctcagcctgcaacatcaccgacctttgcaaccgtcgtgtaacaactcttcattgtctgcgttgcttgtacggcacagcaaactacaaagctcaggcacccgagaagaacatgatcgccgtcacaaactacttgaaccaaactcagaagcggtccgacatcagacgttacctcgagatcttccgcccgaaagcagcaccagtcgccgacaccttccccatcgtccccatcgcaaacgcttcagacaatcaagggcctctggagccaggcgagacaccgagcatcgagggtgacatggatggagagttggtcatcggaatctcttggccaacatccttcatggcattctccaccggcggatcaccacccttcctacctgacctcgccactccgaccaataccaacgagccctatctcgagtggcaaaattaccttctggcgcaagataccttaccgcaagtcatcaccacgtcgtacggcgatttcgaacaaaccataccggtcccatacatgacacgagtatgcgaaggtttcgaaaagctggccgctcgcggagtctcggtcatcttcagcagcggcgacaccggtgttggcccctccgatgcttgcatctcaaacagcaactcctcgcaatccatgttcctcccggcattcccagcgtcttgtccttgggtaacagccgttggcgccacacaggactttgagcctgaggttgctgtgtcagcttttggtagtggtgctggcttttccaatcactttgccatgccagattaccaagtcgatgctgtcaatggttatcttgaaaagataggagacatgcacactggactctacaatcgctctggccgcgcgtacccagatgtcgcagcccaaggagttcggatcgccatcgtcacagagcttcgccaaattgccggcgcaggcacaagtgcatctgcgcccatctttgcagctgtgattgcattggtcaatgatgcacgcctcgcggctggcaaacctgtactcggattcttgaatccatggatctacggtggagcctttgcggcttttactgacgtcaaagatggatcttcggtcggttgcgacacggatggtttcccagctgcagatgggtgggatgctgttaccggattcggtactccagtgagtgcaactaatccagccattgcttag

SEQ ID NO: 2418 - DNA, 1236 bp, Aureobasidium pullulans
atgatgttcagcgccttgtaccaaacgctgcttttcgcattcttctctgtcgcatttgcggctaatggatcctccacatacacataccagaaccaaggatcgcaggcattttctctggctctcggactcaacacaaccggcaatgaccttcattttaatatgacggctccgtcgacttactcatggttcgccttcggagttggtagtcagatgagaaactccatgatgttcattggataccccagtgcgaacggcacaggtgtgacattgagcccacgtctagctactggacaccaacaaccacaatattcctccgatctgaatgtcgaagtcgtcagcagttccatcaccaatggcgcatatcagctcatggctatctgcaagaactgcacaacctggtcgctcggaaccatggatactacatcaacgaaccagcctttcatctttgctcttggaccaacaggctcggccatctctagcgactctacttccgagagtatccgtcagcactccatgtacaattctttcacactggatatgcaacaagcttctttctctggctcagacacacccgctctgagtcccagcagtggcgccgtatcttccgatagtggtagtggcagtggaagctcttcctcatcttccgataccgccatgtcctccggaggcagcaacacctataacatggtgcacggtatattcatgtccatcgcctttgtgatcctcttccctctcggcgtactcgtcctccgtctcggccacagtgtcattggtcatggtatcatccaagccctagcctactgcttcgtcatcgtcggcctgggaacgggaatctatctctcccaacaagatccttcgacgcgcaattataattcagctcatcagatcatcgggcttgtcctcttctcccttctcgccattcaagcactaggcggtcttctgcatcatcttctcttccgtcgcggcaagaattccatcatcggaaaagtccacatgattctcggaataggtcttcttatcctcggtatcgtcaacgcacctctcggtctcaatctcgcaggcgacagcaagtacaacaaatactacatcatcgtcgtcgctatccttggagcactcttcttggcattgagagcgtgggctgtcgtcagaaacagaaagatctcgaagagagagggcagtgagaagggagtgcttagacgtggttctagcagtgaggagggtgttgcaaatatgtag

SEQ ID NO: 2419 - DNA, 1308 bp, Aureobasidium pullulans
atgaagacaacgcaaacccgtcttgcagccgttgcggctttgacatccggagcagtagctatcacctgcgacaaagattcattgcaatctgcattttcgtcaattgctactgttgactttgcaacatggatgccggccaacagcacattcaacgttcccaaggctgacatagcctatccgactgcaccgacccagttgagagcagcatgcgctgttcaggtttcggtcaagaatggtacctccaattacggcttcggagtcttcttacctgatgatgctgtcggcaatggtggctttgctggtggaatcaattggctggacatgggcgccggcttgggttacggattcgctgtcatgtctacggatactggtcacaacagcgtcaacaacaatggcagctgggcttatcacaacgaaggcgtaattctggactggggctatcgtgctatgcacggctccacagtactgggcaagcaattgaccactgcatactactcaaacgacattctctacagttattacagcggatgctccactggcggcagacaaggccttcgtaaccttcaactcttccctgatgactttgatggtgtggttgccggagcgcctgcttggtggactaatcaccttcaaccctggacagccaaagtcggaagctataacctgcccaacacttccgtccatcacatacctcctactctcttcccagcgattggagctgaggtgatgcgccaatgcgacggcgcagacggtgtagtcgacaccatcatctccgatccagaagcatgcgactttaaccccgatctccttctgtgtacacccagcaagaacacctcatgcctgacagtgcctcaactcaacactctgcatcaaatctacagcgactacgtggataccaaccagacttttgtcttccctcacctttggatgggtagtgaagctcaatgggtacctctgctcggtttgaacgcacccaacaatctcggaccccactatgttcaatacttcctccaacgcggccccgaatggcaatggcaagatttcgattacggcgtcatccaacaagccgatgctcaagatcccggaaacgccactgctgatgattttgatctttctcctttcatggaaagaggtggcaaacttctccactaccacggcatgggcgatggcttgatcccaaccggcagctctgtctacttacactcgcaaatcttccgcactctcgctcccaaaggtgtggatctcgattccttctaccgtttcttcctcgtccctgagatgccaaacatgatgttctgcttgccatga

SEQ ID NO: 2420 - DNA, 1158 bp, Aureobasidium pullulans
atgtcgatccgacgaacctctgccctcagccttgtggctatgggtgctgccggtgtatctgccttcactgcctccaacgcaggcgtcaagaatgggtgtttctggaatgttgacggacttggttccttcaacactcagtggtcggttgcagagttcacaaccagcaccctgagcagtgttcaagacgaactatccgcctcgtcatacacagttgaggctggcaattcaccactagcacgaagattcgatatcaccaacattggtatctcctctgacaatgccttgaccttgaccgttcccggaggacagtccaccggtcccatttcatccgctcagatcaccactgcctacagtgacatcctcttcggcagtgtccggacagtggcaatggtcagcggcgcggcaggaacgacccacggatttaccttctacgcaaacgataatcaagaagtcgactttgccttcctcagttccgacccatcggtcgttcatctcacaaacgaacaagtcaacagcacgtcacctttttcgacgtacactgtttcagctccttccgatgcaacaagttcttaccacgaataccgtcttgactggactaccgatgctacgagattctatatcgacggtactttggttcatacgatcactgaaaatgttcccagtcagcaaggcttctggttatggaactcatggtcaaacggtaacgcttgggctcaaggacctcccgccacaaactctgtcctcaagatcaaaagcattgatgcatacttcaaccgcacctccgtcatccccagcggatcctgcctctcctcctcttccaacaataatgccgccgctgccgcttcctccacatcaacaaccccttcctacactcccgcccccaccgccaccaacaccaaactctgccccaaatacgacggcacagtctacacagccaccaacggcgatctcttcgaaatcgcctgcggtacagactttgcaggcggcgacttcaaaatggtctgggtgaattccatgggcgcttgtattgaagcttgctcttctactgaggggtgtgtggatgttagtatgagtggaactgcttgttacatgaagaacaagttgaagaatgcgttgaagaattctggtgtcaatggtgcgaagaagatttcagcttga

SEQ ID NO: 2421 - DNA, 1185 bp, Aureobasidium pullulans; identical to SEQ ID NO: 2034

SEQ ID NO: 2422 - DNA, 1911 bp, Aureobasidium pullulans
atgttgctcaaaaactctgccttgttgttaggcgcgttgctggcttcgtccgccgtagcccaattcccgccgaagcctgaggacgtcaagactgtgaagtcgaagttccatcaaggtattgagatatcgtacaaggaggttgatcccaccgtttgcgagactaccgaaggtgttcgcagtttttctggatatgttcatctcccaccccacagcatcaacgagacccatgagagacaggattatcctatcaacaccttcttctggttcttcgagtcccgcaaggacccccacaaggcacccctgtcgatttggctcaatggtggacccggaggtagttccatgatgggagcactctcagaaaatggcccctgtttcgtcaacagcgatagcaatagtacccacctcaacccgtggtcgtggaacaacgaggtcaacattctgtacatcgaccagcctaaccaggtcggctattcatacgacgtcctcaccaacatcactgtcaatctacttgccgataatgagggccccgatgccatcaaacttggcgatttcagcgaaggtgttcccgaccagaacgctactttcttgattggaacttctagtagccagaacatctcggctactgccaacagcacgcagcacgcggctgtggctttttggcactttgcccagacttggtttgaggagttccctcaatacaaacctcatgatgagaagatttctctattcacagagtcttacggtggaaggtatggccctacctttgtcaagaaattcatgacccagaacgaattaattgccaacggatcaatctctggccccggcacgcactacctccgtctcgacactttgggtctaatcaacggatgcatcgacgccgaagatgccgcttctgcttatgtcgagttccccatcgccaacacctacggcatccaaggtttcaccgaagaacagtacttcaaagccaaatacgaatacattcgcaaagacggcttgcgcgaccagatccgcgaatgccgcagattgcaactcgaaaccgatcccaacgactacggcgatgtggaaaacacaaacacttactgctacaaagcagccgaaaacctaggaaatctgaccatcgccgcatatgtagaaagtcagaaatgcggctggttcgacataacacaccaaggcaccgatcccttcccttccacctacctcatgggatatttgaaccaacaatgggtgcaacaagccctaggtgtacccgtaaatttcaccgccgtatccccagcggtatacgaagctttcacgcacacgggcgatatttccaaaggcggactcctggatgatctggcttatatcctcgacaacggcgtcaaagttgcaatgatgtacggagaccgcgattacgcctgcaattggctcggcggcgaacaatcatccctgcacatcccatggtccaacgcctcctccttcgcctcggccggctatacccctctagtgctatctcccttttcctcaggcgggctcgtcagacaattcggtaatctcagcttcaccagggtctatcaagctggtcatctggtccctagttatcaaccgcaagccgcatatgagattttcatgcgcagtttgttcaatagggatgtcgctactggcgaaatcgccgtttctgcggattatgggactgaagggagagaggatggttggacgcctagtgatgtgttgcccaagccggagaatgaatgttatgtgctcaaccccggttcttgcagtgaagaggagcaaggatggctcaaagatggtagtgctattgtcaagaattggattctggttggaagggagaagggtgggaagagaggtggacgtggtcatggagaacaaggttcgcaaaccgtgttggcggaggagggtatatatgagctttag

SEQ ID NO: 2423 - DNA, 1770 bp, Aureobasidium pullulans
atgtggtcttatctactgctcactttgtttgccgtccaaattcacgcgatatggccaataccgtcgagctcgtctatgggagaagatgccttgttcttggaccgcaacgtcaagttcatctataatggtgccgcacaggtagcagcgccccagccagagcagataccgttcgaacatgaccctaacaacttctcctcgcagtacggaacctacggccaaaagaacgcttcgtcacagaagataatctcgactgctatcaagacgactacccagacactgttcgaacagaacttcgtcccatggaaattccatcctcgtcactccgatttcgaacctgcgatgaatgcttcatgcacctatatcaaattaatccatctcgaacagactgatagcgatccggcaaacgtaacaaagcctttggccggcgatgtcgacgagtcatactcgctgtccataacaagtgagggccaagccaccatcagcgcggcttcttcggtcggtatcgctcacggtctgacaaccttcacccaattgttctacaaacattccagcggatccgtgtacacaccgtatgctccagtaaatatcacagatgctccaaagttccagcaccgaggccttaatatggatgtctctcgaacatggtacgcgcctgctgatattactcgaatgattgatgccctggcatacaataagttcaaccgtctgcatcttcatgtcacggatgcccagtcttggccacttgagattccagcactgcctcttcttgccgaaaagggctcataccgggaaggattgacatacagtccgtcgacgatggcacacattcaggactatggtgcctctcgaggtgtcgaagtgatcctcgagattgatatgccaggccacacttcatccattgcctactcttatccagaattgattgctgctttcaacgagaaagactggtcgacatacgctgctgagccgccatctggaaccttgaagttgaactcctcagctgtgaccgatttcctggacacacttttcgacgatctgctgcctcgagttctgccatactcttcgtacttccataccggcggtgatgaagtcaatgtcaatgcctataacctagatgatacggtgagatcgaatgacactgcgatcctccagccattgatgcaggcctttgtcgatagagctcacgacaaggtgcgagctgctggactcacacccatcgcgtgggaagaaatgctcttgacctggaacttgacactgggacctgacgttattgttcagacctggcagagcgacgaagctgttgcacagaccgtcagcaaaggtcacaaagcgcttgttggcaactacaattactggtatctggactgtggtcatggtcagtggcttgacttttacccagaggtcgctcagaactactaccccttctatgactactgcgcgccactacacaattggagaatgatgtatgcgtacgacccgctgagtggcgtgcctgcaaacctgacacacctcgtcctgggtggagaagtgcacatctggagtgagcaaaccgaccctgtgaacgttgatagacaggtgtggccacgtgcctgtgcagccgccgaggttctctggagtggcgccaaagatgagcaaggacagaatcgcagtcagatcacggcaagtccaagattgagcgagatgcgggagcgtttggttgcgagaggtgttggcgccgagcccattcagatgcctttctgtactcagaatggcacccaatgcgctctgtga

SEQ ID NO: 2424 - DNA, 1260 bp, Aureobasidium pullulans; identical to SEQ ID NO: 2037

SEQ ID NO: 2425 - DNA, 1653 bp, Aureobasidium pullulans
atggctccttacgctgcaatcctgcagctctccctgctgggtctcgctagccaggtctctgctgctgccattgaacctagagcttctactccctatgctcctgtctccgcaagctgccccagcactcctcttgtccgtactgccaatggtctcggctcgtcggaagctgcatacatcgcagcccgcaaacccaaagctgatgccgctcttgctgcttggttgcagaagaccgactcttctttcgccactactgacctccctactgtcggtttggtcctgagtggaggtggttaccgtgctctgctttctggtgccggtcttatccaaggtctggattctcgtgactcttctctatctaccagtggtctttatcaggccatgacttacgagacgtctctttccggtggtgcatggttcagcacgtcttggactggattgaactggcccaccgtctcttatctgagagacaacctgtggtctgaatcttttgccgattcgcttcttgtgccagcacgtcttctttccgccgttgcatatgctgagattgtcaaggatatcgtagacaaggccaaggctggcttccagcccactcttatcgacgtttacggcagactgctctcctaccagcttttaagcaccaactctcaggatatcctgaccgatggtgccgtatccaagaccttttctagcgtggcttcatcttccaactttaccaaccacgctgttccttaccccatcatcaccgccagaggtgtgaacacctttgaaggagaatgcattcctcgtgaaaatggaacacaatacgaattcactccccacgagttcggctcttgggattccgatgtgaacgcattcacccaaaccgcttacctcgggtccaaactcacaaacggagctcccaccgtatcaggcaaatgcatcaaaaactacgacaacatcggttacgtagcaggcacctcctccgccctcttcaacaactactgcaccgccctccccgcaaaaaacaacacacagtcactcgctcaaacccttcaagccatcatcctcaacgcccacagcccggtcaccagagatctctacgctccctaccctaatcctttctacaagtaccctgcctctacgctcacgaatgctcaaacggagatccagatcgtagacggaggagaaggaaattccgcaatgccattctggccactcatccaaccggaaagaaacgtcgatgtcataatcgccgccgacaatggcgcagacaccgccgatgatttcccctccggcaccgccattgtaaccgcataccaacaagcgcaactccaaggactatcccgcatgccttttatcccctctttgaaccaatttgtcgctcaagggttgaacaaacatgccgttttcttcggctgcgacactgcggaaacagcgactattgtgtatctgccgaataacaattacacatatgcttccaacatcgatactgtgattatacagacttctgagcaacagacggctggtattatcgcgaatggaaatgccatcgctacgcagaatggagaggatgggtgggcgacttgtttgggatgtgcggttatgaagaaaactggctctgttttgcctcaggcttgtaccgcttgttttgacaaatactgttataagcaatag

SEQ ID NO: 2426 - DNA, 1227 bp, Aureobasidium pullulans
atgtttgtcaacattcctagtgtgctttcgctcggtcttctctgcggcagtgtagtcgccgcacccaagaaatgtcctaaaggtttcgtgacaactaccggcacgaaattccaacttgatggcaaggacttttacttcgcaggcacgaatgcctactacttcccattcgacaacaaccagacagatgtcgagcttggtctcacggctggcaaaaaagcaggtcttcctgtcttccgcacttggggcttcaacgacaagaatgcaacatatgttactggcggattgcctcaatatggagccgaaggtgccgggaccactgaagtcgtcttccagagatgggcaaatggtaaatctaccatcgatgtcacacctttcgataaagtcgtcaatgcagcaacgaaggtcggcagcaagttgattgtgcccctgactaacaattgggccgactatggtggtatggatgtgtacaccgtcaatcttggtggcaagtatcacgacgatttctaccgcgatcccaagatcaaggcagcattcaaacgctacgtcaaagccatggtcacacggtacaagaactctcccgctatcatggcctgggaactcgccaacgaaccccgctgcgccggcgacgccgtccgcaaccttcccagctccggcaactgtacagccgccctcctcacctcctggaccgacgaaatgagtacatacatcagaagcctagatccctaccacctgatcacctggggcggcgaaggcggcttcaacgaccccagcgatgcagactgggcatacaatggttctgatggtggtgactttgacgccactatcgctttgcagaatatcgattttggagtgttccatacttatcctgattggtggagtaagacggttgagtgggcgaatcagtggatcagggatcatgctgcttcgggtaggaaagctggaaagcctgttgttcatgaggaatatggttggttgaccgccgccgcacgactgcaatatctcaacaaaaccgcagctgccaatgaaaccagagttgccgtcattggtggttggcagaaaatctcgctggaggaaaagatgagtgacatgtactggcaattcggctactcgaactactcttacggtcgcaacaacaatgatggctttacgatttaccttgacgatgctgaagccaaacctcttgtttacgaacacgcgaaagctgttgcagctctgaatcgccgatag

SEQ ID NO: 2427 - DNA, 1692 bp, Aureobasidium pullulans
atgaagtattctgcagttactcttggcctgttgctggccggcacgtctcacgcaaagcaatatggctttctcaaggacaatggcaatggctcttggatcattggaaacgatgtctggaacatgactcaagaacgtatctatggttccaagttgtactacaaggatcaagaacttgtcggcgaagctactggtcactacgtcagttacaatggagcagccagcaaccttgcgtggacaagtgcaaagattgtcaagactggaagcaactacatcgatgtccagttcgacgccactgaaggcgagatgcattgggtcatcttcaacggtctcgctggcgcatatcaatactttgtcaaccgtgctctgccagtcctaggagagttccgcacgctctggagactggacaatgaaactttcaccagtgcttacaatgcagacaaggatggggttctgcctccattgtccgaatacgccatctcgaccaagatccaggatgagacttggaaaacaccggaaggtaattatctgaccaagtatgattggtctggtaacgtcagggagcaagagtactggggtgtgtatggtgataactttggcagttggtatctgcaccccggcaaggattacttcaatggtgatcatctgaaacaagagttgatgaaccaccgcgaatcagcgaccggagatgcagtccaactcaacatgatccacggcacccacttccaagctctgtccaacgatgtcctccccaatggcaaaatctggggaccctggctctggtacctcaacgatggaacaaaagcagatgtcgaccgccgctacaacaacgagatcaactcttggccctacaaatggctcgacgacgcagcatacaattcccgcgtcgcttccgtgacaggaaaactcctcctctccgatggcagacctgctgcaggcgctgctgtattcctcggcgacaatcaccccaacaagacaactttggatatgggcagtgattactactacaccacctacgccgacaacgacggttctttccgcttcacagacgtccgtactggactttatgcccttcaagcgtggtcaaacggcggcagtattggcgatgtcaccaccacatttctcagaaacgacgtcgatgtttctggctctgcgactagtaaaacccgtctggataaattgacatggtctgttcctacctcaaacacgatcttccaagtcggcgacttcgacagaaaatccactggtttcgctttctctggaggctttggagccggacgcgtggacaagtgtcccgctaatctgacttataccgtcggaagcagtaaaaccgcagattggtgttttgcccaaaacgcaaagggaacttacagtattgcttttcctctgccggtttcgaacaccaccacttctgacgcgcttttgacggtcagtttggctggatattctcaaggcaccactgttaatatctttgctaatgacgtgagaattgggaatctgagcagtagtggtatcttgagtgatcctagtttgtatcgttctggcactgtggctggagagtggcatcagttcgaattccctatcaacgggagtgctttgaaggcgagtaataagattgatttcagggttacgagtttatcgaccagtttgtggaggggaccgatttatgatgctattaagttggagtggatttag

SEQ ID NO: 2428 - DNA, 2298 bp, Aureobasidium pullulans
atgaagtctgttctttcagtcaacgcattgttggcgttagcaggtcccgctgcggcttacacttcttggagctataccaatgtgtctgatccttattatggacagagtcctccagtgtatccttctccttccggcaatggatcaagcagtcctcaatgggccaatgcctatgctcaagcacgcaatctcttatctcagatgacacttgaggagaaggtcaatgtcacccgcggcttcactggcacctgtgtcggcaacaccggcgctgtaccccgtctcggtatcgagccaatgtgtcttgccgatgcacctgatggtattcgtggccaagagttcgtcagtgcctttcctgctggcattcacgttgccgcgaccttcgacaaggatctgctgtatgcgtatggtcgtgctttgggtgaggagtaccgtggtaagggcattaacattgctcttggacccgttgcaggtccgttgggaagagttgccagaggtggtcgtaattgggagggtctttcggccgaccctcacctcgctggtgcgggtatgggagccattaccagaggtatccaagatgttggcgtgatcgccactgcaaaacattggcttctgaacgaagaagaatttcgtcgcaacccagctgtcggagaaggtgaagcaatgtcgtccaacaccgacgataggacccttcatgagctctacgcctaccctttcatggactcgcttcgcgaaaacgttggcgctgtcatgtgcagttatcagcgcgccaacaactcatacggctgccagaattcgaagctgttgaatggtgttctcaaaaccgagctcggcttccaaggcttcgtcatgtctgattgggaggctcagcactctggtgtcgcgtctgcaaacgctggtcttgatttgatcatgcccgacggaggcttttggggcggcaatctcaccaatgctgtcaacaatggctcggtaactctcgatcgtctcgacgatatggtgactcgtcaattagcgtccttcttctacgtcggtcaaggcgacggttaccctgcagcagccgtgcacagtaatcttcaactccaggaacccgtcaacgtgcaagaagaccactcggatctgatcagagagattggggctgcaggaactgtgcttgtcaagaacgtgaacagcacgttgcccctcaagaatcctcgcttcttgtccatctacggatatgatgctaccataaaagcaaccccttggcagaacccatccagatacggcggtggctacgaagtcaacttcggctgggataccttcaacggcacgatgatcactggtggaggttcaggtggcagcacgcctccttatgtgatctcgcctttccaagccatccaggaacgcattgccaaagataagggcactcttcgctgggacttctactccgagaacccttccccaccctacgtcaacactgatgcctgcatcgttttcgtcaacgcctacgcatctgagagtttcgaccgcacaactttggctgacgagttcagcgataacttgatcaagaacgtcgccgcaaactgcacaaacactatcgttgtgaatcacagcgctggcatccgtgtcgtagattcctggatcgaccaccccaacatcacagccgtccttttcgccggtctccctggtcaggaatcaggtcactcgctaactgatatcctctacggcgatgtttcaccctccggccgtctgccctataccgtggccaaaaaggaagaggattatggcaatttgcttaattcgacgatttcctttgaccctcatcctcagtccaacttttcagagggtgtgtatatcgactaccgccacttcgaccgctacaacataactccccgcttcgagttcggctatggactttcctactcgaccttcaactattcgagattgcagacttctagacttgcaggtggagatttgtcaccttttcctgacgctgggattgcgatcatacaaggcggacaccctcagctctgggatgaactcttcgcagtctcgttagagattacgaataccggcgatgtgtttgcgaatgaggtaccgcaattgtatgtggggattgccgatgcgccaaagaagcaactgagagggtttgagagggtgccactgcagcccgggcagagcaagagggttaatctgccattgacgaggagggatcttagtgtgtgggatgtggtggctcagcagtggaagttgcaggctggggagtatgctgtctgggtcggagcgagtagtagggacatcaaattggaggggtcaatcactgtttga

SEQ ID NO: 2429 - DNA, 1182 bp, Aureobasidium pullulans; identical to SEQ ID NO: 2042

SEQ ID NO: 2430 - DNA, 1776 bp, Aureobasidium pullulans; identical to SEQ ID NO: 2043

SEQ ID NO: 2431 - DNA, 1899 bp, Aureobasidium pullulans; identical to SEQ ID NO: 2044

SEQ ID NO: 2432 - DNA, 1194 bp, Aureobasidium pullulans
atgtccaaattcacactacgctggggcattctcgccactggaggcatcgctgagagcttctcgagagacttgactgtcaaccccgagactcgcaatgtcaacgacatcaagcacgagattgttgctgctgccagttcaagcagtgccgaccgtgctagtcaattcttgaagaaggtcggcgcaccctcttcagcaaagggctacggatcttatgaagagctggttgccgacaaggacgttgacataatctacgtcgctacacctcactcgcaccactaccagaatgccatgctctgtcttgagggtggaaagaatgtcctctgcgagaaggctttcaccgtcaacgctgcgcaggcaaagaagctgtcagagaaggccaaggagaagaacttgttcttgatggaggctgtttggacaagatacttccccttgtccatctacgtccgcaacatcatcacttccggcaagattggaaaagtccaccgtaccttcgccgacctgtccattggcactttgcctgaggaggccttcgacaactcacaccgcatggtcaaccccgacttggctggaggtgctctcctcgacctgggcatctacgccttgacctgggtcttccagactctctaccacacccagcccgaatctgcacgtaaggcacctaccgtcgtttcatccctcaagaaataccccaccggcgccgacgagatgaccaccatgcttctcaccttccctcgttccgaagagctcggtggagatgctcacggtatcgccaccaccgctttccgcaccactcctgacccagacggtaagggcagcgctggccccgccatccgcgtccagggtgacaagggtgaaattcaagtcttccaccctgctttccgcccctccaagaccaagctcgttctcttcgacggcactgtagaggaaaagaccttcactcaacccggacctggcaagggctctggcttttacaacggcttcggcgacgacaagaaccccgagggcgagggtcacggtatgttctgggaagccgatgagtgcgcttttgctctcaaggagggtagaaaggagggcaagtacgagggtctgcaggagagcattgtcatcatggagaccatggatgaggtgcgcaagcagaacggtatgacctaccctgagaagattgagacgaccaaattccctactcagctgtaa

SEQ ID NO: 2433 - DNA, 1635 bp, Aureobasidium pullulans
atgttttcagtgttcactctgtttggccttgcactggtctttggacttgggtcgtgttatatccttggtctaggtttgagaccaaagaactacccgcccggtccccgtaccttaccattgattggtaatttgcaccagatcccaagcaaaaatgaatatctgcagttcgccaaatgggcaaaggaatatggacctatctacagcattctggctggcagccgacctattattgttctttccagcgtcgaggtcgtcaaagacctactggacaaacggagcgctatctactctgatcgtcctgaggcatatgcagcaaatcacatcccaatcagcaagctacgaatggtctttatgccttacactcccttatggcgtaaagtccgcaagatcgcacactctctgttgagcatcaaggtcgtcaagaactacgacgcctatcaggagatggaacgtaaacagatgttggatgaaatgcttgagaatcctgtcgacttctttcctagcttgcagcgctatacgacgtctctggcagccacgattctcttcggctggagggcttcgtcaagtgcggatccaaggattcgaaaactcgacgatgagctagctgctttgcaggaagctatgagcacaggagctgctgcacttatcgatgggttccctttccttcgctacttaccggaggtacttctccctgccaaagcaaacatccgtcgcgcactccaacttggtcatgaagtgcatatggagaactggtacgctgtcaagaagaatatcgccaatgggactctcggaccctgtttgagcatcggtctcgccagagcccaggagaaagacgaaggtctcactgatgaagaagctgcatacacagtcggcaacatcttcgaaggcggcatggagactacctcatcaacattgtatgcttttatacaagctatgctgctcttccccgacgttcaagcaaaagctcaagaagagatcgaccgcgtcgtcggtgctaaacgtccaccagtcatggccgatgcagtcaatctgccatatgttagacgatgtgtcaaagagcttgtccgctggttccccgtcggacctttgggagccgtacctcatgcttgcaccagagacgacgagtacatgggctataagatccctaaaggtgcaccaataatcttgaacgcctgggctatcatgacagatcctgaacgctaccccgagcctcgccgtttcaaccctgatcgtttcagcgaagataatgacgacgtctccatggctgagatggccgcccacccagacccgagcaagagagacaccgttggtttcggagccggaagacgcatctgccctggcatgcatgtcgccgatcgaagcatgttcctcggtgtctctggcattctctgggccttttccatcacgccaaagcaagatgtccatggtagagatatcttgcctgatccagacaacctgatcgttggcggtattgctgctagacctgaacctttcgtagcgaacattctccctcgtgttggaaaagcagagattgtcaagcaagagtgggaggatgcacagaaactgctcgacccggagacaaaacagtggaaggagacaccagagggtgactgggatgtaactctgagagtctga

SEQ ID NO: 2434 - DNA, 1026 bp, Aureobasidium pullulans
atgcctcatatcctcgttaccggtgcttccggatttctaggcggagcagttctcacagcgatacaaaaagcacatccggattggacattgacgaatctggatctaagaccgcctccggtttctcaacctggagtcgcatatgtccaagcagatataacacagcaatcagaagtagatctcgctatacgtaaagccaatccggatgccattatcaatgtagccggctgggtgccaaacggcagtctacgatacagcaattcgaaagcactgcgaggcaaggtgttcgccatcaaccatcagggaaccttgaacgtgttatcagcagcccagaagacgaaatgcaaggcctttgtacaaacatccagctgcacggtagtatcagacgacctggaccatgaatacccaaacatgaccgaggacataccaatcggacatgccactctagcctacggagccagtaaagcacccgccgaactagccgttctagccgccaacactcccgcttttaaaacctgtgccttacggccagcaaccatcatcggtcctggagacacctacggcgttatcgcaacgatacacgcctgcatcgtgaaaggtgaaacaccatggataataggcacaggcgacaacatgtacgatttcgcctacataacaaacatcgccgacgcccatctcctcgctctcgataacctgctctcgacgaccccaatccctgcatcagcagcaggagaagcaatattcgtgtcaaaccaacaaccagtctatttccgcgacttcatgttggcgatatggaaagaattcgatcatgttccgcctttccagctcgtggtgccgacgcccttggcttgggttgccgggttggctgcggagatcaagacgtgggttactggggcaaaggcgatcaccggcgcatcgtctgggctcgtgggatggaaacgaagacttctttccgtgtggaagccttggagaggtggcgagatgtgggataagaagataggaagaaacggagaagaggaagaggaatag

SEQ ID NO: 2435 - DNA, 1050 bp, Aureobasidium pullulans; identical to SEQ ID NO: 2048

SEQ ID NO: 2436 - DNA, 1911 bp, Aureobasidium pullulans
atgatgccttttgtgtggttggcagccgccactttaattggtgtctacatttacagctactatcgttgcttcgcccgcaacctcgccgcagccaaacaatcgggtctgccctacgttgtagcaccagtctatgggttcaatcgtttctggctcgtaacacacaggctttggattccgttgttggagaaactccccaaatcttggacagatccgtggttacagttcctggatcctgaatggacttggctactgagacgcgagccattcaaggctatcggtagtgacatcttcattgtgtgctctccaggaaagaacgcattgttcgtagccgaccccgaggcaacaacacagatcgttacccgacgcaatgacttccccaagccaattgaaatctacggctctgtggatctctttggcaagaacgtagtgagtacagaaggctcgatctggcgccaccatcgcaagatcacttctccaccatttaccgagaagaacaatcatcttgtgtggcaggagagtctgcatcaggcacagagcatgatggcttctctggttggtaagaattccgagggcaagggcactgtgacagacatcgctgccgccactatgcggttgagtttgcatatcatcagtcgtgctggctttggcagacgtctgctgtggccgcatgaagaactcgaggagaatggccaagctggtgtggtaccggaaggtcacacaatgacctacaaggatgcattgagcacgctactggagaacatcatcgctgtgatgctgctccccaagtggtttcttgtaaactcacccatcaagcaaaataaggtcgcctacgaatctttcaccgagtggggcaagtatatgcgtgaaatgtaccttgagaagagggcggaggttcaagcaggcgagaagcgtgagggtatggaccttatgggagcgctcgtgagtggcgctggcatcaaaccggatcaagacccagagaaggccgacaaacaactcctcactgacgacgagattttgggaaatgctttcgtcttcatcctggcaggtcatgagaccacagcaaacacgctgcacttcgccatgctatacctggccatgaattggtctacgcaaaaacttctccaagacgatttggacgaaatctttggtgaccgatcgattgaccaatgggactacgagcaggatgttcccaagttatttggcggcatgtgtggtgcagtcatgaacgaggagcttcgtctgatcccccctgtcgtcggcattcccaaatgcacactcaaggactcacctcaaccactgacactttctggccgtcgtgttatcgtaccagaaggtaccgcagtaactctgatcacggtcgcctctcaccgcaacccgaaacactggcccaccctctgcggttcaaacgcctcagaggccgaagtcgaaaaagacctggcatcatggaaaccgcagagatggattttggacccttcaaagtcaaactcgacagcagcacaaaaacatgcacagcaaaatacacactccgattcggaagaggatatcggcggtcctcaatcctcggatacttcatctcatctcttcagccctgagcgtggagccttcatccccttttcagaaggctaccgcgcatgtctaggccgtcgtttcgctcaagtcgaggttctcgccgtactcgctgccatcttccgcgaatacagtgttgagctggacttggacaagtacgccagcgatgaggagcttgcagcaatgagcgaagcatcgaggagatcaacttgggacaaggccaagtctacagcggagaatctgctccagcacggcatgggaactatcatcacaattcagatgcgcacgggcaaggtgcctgtcaagtttgtcaagaggggaagtgagaagtacaagtacgattga

SEQ ID NO: 2437 - DNA, 1173 bp, Aureobasidium pullulans
atgcacatttctcttctgggggctgcgacctctctgctatacgtgagcgctagtgcattcactccggcctcaacttctggaacagacaagcttaacgaccatggcatgacaaaattgaagacttatctgcacaagaatcgtggtcagaactcttgcagcttggacaacgccgtcaaacgtcaagaatggagctcgctatccaaatcaaacaagaagaagtacacggatgcagttttgtgtcttcaatcaaaaccagcaagaagtggaagcatcgctccaggtgcaaagtctcgctacgatgatttccttgcgactcacatcaatcaaacattgaccatccatggtactggaaacttcctcagctggcaccgttactacgtctacaccttcgaagaggctcttcgtaacgaatgtggttacaagggatatatcccttacgcaaactggggcaaatacgccgaagacttgctcaactctccaattttcgatggcagtgattactctatctctggaaatggcgagtacagaaaccacactggtgcttctatcccgagtgctgccactcctttcattcagttgcctgcaggctctggaggtggctgcgtgaccaccggcccattcaaaaatatgaccgtcaatctcggccctctcgcacctgtctttgacgacataaccccaaatcctcgtcctgacgggctgggctacaaccctcgctgtctccgccgcgatgttggtgtatacgctgccagtatcgcctcgacagacgccaacagcaccgatctgatcagagaaaatacctacatcggcgatttccagacaaccatgcaaggcgatttcgcaggagggcttctcggagtgcacacagcaggccacttttgggctggaggagatcccggagccgatatcttctcttctcctggtgacccatggttctggctccatcacgcccaaatcgaccgcacctggtggatttggcagaaccaggatcctgctagcagaagcagtgtcaagggcaacaactcactggctggcaccaccacactgaacaacagtccaccttctaggaacactagattggacgatgtcattgatttgggtgtcaatgctgagagtatcttgattagggatgcacttagcacgaccgccggaccattctgttatgtttatgtttga

SEQ ID NO: 2438 - DNA, 1857 bp, Aureobasidium pullulans; identical to SEQ ID NO: 2051

SEQ ID NO: 2439 - DNA, 993 bp, Aureobasidium pullulans
atgatgcatttgttctcgtccttgtcattggcagcaagtgctttggctgcagttgctgtccaagaaccaacccatgaccaagtccctcttggaccttcaacccttttccagatcccgactctaggctttggcacctggaatctgaaggagaatgctaccgaggccgtctcttacgccatcagtactggatatagacacatagatgctgcagcgatatatggaaacgagaaagctgtcggcaaaggcatcaccgagggcttggagaaagccgggttgactcgtgatgatctatgggtgacctccaagctctggaatgaccatcatgctcctggcaaggtagaagcggccatcgacaagaccctgtctgacctcaacctcgaatatcttgatctgtaccatatgcactggcctgttgcttctaccagaaagggaaacgaaatatccttcctcgacacctggaaggcaatggtgcagttggttcagtcaggaaagactagacgaattggtgtctccaatttctcgcccaaccaactcgacactttgttgaaccatacaacccacgttccgtttgcccaccaaatggagctccatccttaccttcctcagaacgactggatccagtaccacaaagttcgtaacatccgcgtaaccgcctactcgcctcttggaggaacaaatcccacctatcatcaaaagtcaaaacacatgccgactccgttgctggagaccgaggtgctcatcaaaatagcaaacaagcacaatgccaccgctgcacaaatctcactggcctggggtatgagccgaggaaccagcgtcatacccaagagtgcacatgcagcaagaatggatgagaatctttccagtaagcacgtcgaacttgacgccgatgatttggagactattgatcaactgggtcgtgactttaccttcagatacaacgaccctagcaaaagctggagagtcaagttatacgaaggccttgagggcgtgtga

SEQ ID NO: 2440 - DNA, 2088 bp, Aureobasidium pullulans
atggcgcaactcgatactctcgacattgtcgttctggccgccctgctcctgggcaccgtcgcctacttcaccaagggtacctactgggccgtcgccaaagacccctatgccggctctctcgcaaacggtgccgccgcgaaggctggcaagactcgggatattattgaaaagatggacgagtcgggcaagaactgcgtcatcttctacggctcgcagaccggcaccgctgaggattatgcctcgcgtctggcaaaagagggttcttctcgtttcggtctcaagaccatgacggctgatctcgaggagtacgactttgagaacctcgattctttccccgaagacaaggtcgccatgtttgtcctggccacatacggtgagggcgagcctaccgacaacgctgtcgaattctacgagttcatcagcagcgaagacgtctctttcaaccagggaggtggtatttccgagaagcctctggctaatctaaagtacgtcgccttcggtctcggcaacaatacctacgaacactacaactcaatggtccgcaacgtcaccaagttccttgacagactcggtgccaacagaatcggtgcagctggtgagggtgatgatggtgccggcaccatggaagaagatttcttggcctggaaagaacccatgtggaaggatctggccgattccatgggcttgcaggagcgcgaagccgtctacgagcctgtgcttgaagtcagtgagaagcctgaaatggatgccgagtcggatgatgtctatctgggagagcccaacaagaaccatcttgaaggcaagcaaaagggtccattcaatgcccacaacccttacattgcgcctatcgttgaatcaaaggaactcttcactgtcaaggacagaaactgtctacatatggaaatcgacattagcggctcaaacttgtcctacaccactggcgaccacattgctgtttggcctaccaacgccggcaaggaggttgaccgtttcatggacatccttggtcttgatgagaagcgccacatggtcatctctgtcaagggtttggatgccacggccaagatccctttcccgtcgcccaccacgtacgatgccgttgttcgctaccacatggaaatttgcgcccccatctcgagacagttcgtttcggctctcgcccccttctcgcctaacgacagcatcaaagccgaaatgaccaagatgggaagcgacaaggattatttccatgagcaggttgccgctcgcaattacaacttggctcaacttctcgaattcttgtctcaaggtcagaagtggaacaaggttcctttcaccatcttcatcgagggccttcacaaaattcaaccccgctactactctatctcatcctcttccttggtgcaaaagaacaagatctcaatcaccgccgttgtcgaatctgtggaaactccaggagcctctcatatgctcaagggtgtcactactaactacctgctggctcttaagcagaagcagcacggtgacccttctcctgaccctcatggattgaactacgcaatcactggtcctagaaacaagtacgacggtattcacgtgccggtgcacgttcgccactccaacttcaagctcccttcggatccttcgaagcccatcatcatggttggcccgggtactggagtcgctcctttccgtgggttcgttcaagaacgtgccaagcaagcacgtgatggagaggcaatcggtaaaaccatgcttttctttggttgcagaaagaaggcagaggactttatctacgcagatgaatgggaggcgtacaagaacgatatgggcgacagcttcgagatgttgaccgccttctcccgtgatggtgctcaaaaggtctatgtgcagcatcttctcaagcagcgcgccgccgaaatcgacagacttctgcagcaaaaggcttacttctatgtatgtggtgatgcagcgaacatggctcgtgaggtaaatactgccctgtcgcaaatcatctccgaacaaagagggattccagagtccaaagcggaggacattgtcaaggctatgcgcaacagcaatgcctaccaagaagatgtctggtcatga

SEQ ID NO: 2441 - DNA, 588 bp, Aureobasidium pullulans; identical to SEQ ID NO: 2054

SEQ ID NO: 2442 - DNA, 807 bp, Aureobasidium pullulans
atgcctttcaactataacaaagtactcgttcttggtgccacttctggtatcggctgggctctcgcaagcaagctggtccagaatggcacctcggtcattgttactggccgccgacaggagaagctggacgatttcgtgtctcaacatggcaaagagaaggccgaggcagtacaattcgacatcacgcagctggacaagattcctgggttcgtcaaggacatcatggagtcccacccagacattgacagcatcttcctcaactccggcattcagagaggattcgacttctcaaagcccgagagcattgatctcagctctgtctcggaagaaatgaacacaaactacatctcctacatccatctagtcaccgccttcaccccttatcttcaaaagcagagcaagcagacttccttcatcttcaccacatctggattagcattgattcctatgatgagatgccctaactactgtgcttccaaggcggcactgcatcacttcattctggtgctccgagagcagctcaagaacggacctggtaacatccaggttatcgagatcttccctcccgccgtacagaccgagctgcatgacgaaaaacaccaaccggacatcaagaacggcggacagatcggcatgcctctcaaagactttacggaagcaacgtgggctgggctcgaggcaggcaaggaccagattccggttggcatgtcggagggctccttcaacgggtgggaacaggagaggcagaaggcattccacggtatgaatgcacacattgcaaagatgatggcacagcattcgcagtag

SEQ ID NO: 2443 - DNA, 2058 bp, Aureobasidium pullulans
atggccctcatatcaatcatcgcggtggtagtcgtcgttgctgtcgtgtcattcatcaattatctgaacaacagcaagaagaaccaactaccggcaggagtacaaagactgccaggcccaaaaggctatccaattctcggcagtgtaccagacgtgccagacaagaacagtttcctcaagttccacgaatggggccaacagtatggtcctatctaccaagtcaaccttgccggccataaccatgtctggattacgcgagacagtgttgcccaagaaatcctcggcaagcgcgctgccaacaactccgagcgtcctttcattccatctctgcaagccgacaatcgtaacagcggtcactatcttcctctgatgtctcgaaacgaactatggacaagacagagaaagttcgcgaagcagatcatggacaagtcatcagcgaatgctttttacaactaccctgaactcgagtctgttcgccttctcttcgaattgatgacagatccatctcgatacaaccatgcgctggaatctttcatctcaagagtcacttgcaggctgggatggggcactgcagctccgtccgatgagctcaaacagcgagctagagagttgctcataggtgtctcacctaacggcgcgttgaccaacaaactcggtttcctcaaaaagcttcccgaagctatcgtcccagcaaaagcttgggagtttcgcagatacagaaccgagtctcgcttcttcaccatactgcagaacgaagttagggagaagctcaagagcaagactgctccagagtcttggatgcgtcatttccttgagaacaaaactgcgactggcttcgcgtctgatctcgaaggcgcttatgctgtcggtatgcatggcattgctggagctctgacaatcgctgcgcccatgcaaagcttctgtctcgccatgtgccatcatccacagtaccagtcgatacttcacgaggagatcgaccgagtctgtggcgatagattgccgaagctcagtgatatgccaaacatgcctgtgctaagagccttcatcagagagacactgcgctggcgtcctcctgtcccgactggcattcctcacgagtctgtgaaggacgatatctacgaaggctacttgattcctgctggttccgtcatgcaccctctcgaatggtctattagtcgtgatccagaagtttttcccgagcccgatgcattcaacccaatgcgttggttggagaccaagtacccaacctaccaagaacctctgaccaaatatcctactatcacccagtacagtcagttcggttatggacgtcgcatctgtgcaggcatgggtgtcgccgaagctgatctctttgtcggtattggcagtttggcatggatgttctctctcagtgccagcgacgccgaagccgagaaagccgcagaattacccaaagaacccgttccgtcatcattgccagtccacaaagaagccaagaaagcaacatcactaccatcaggcatgcaaacacctccatcagagactgagattgaagaacaactcgacgaacacttttcagaaaaaatgctgccagcagacacctctatgctctcccgcaagaagaccgtcaagaaaccaaagaatctcgaggctggcggcggtctgagcagagcaaagactgtgacttacaaactccgcctaccaggctcatcactaccaggtcaattccccgctttcttcgaacaacacaccggccccgacacaccaccctcatcaccaaaagcccgcaccgcaatggcaggaacaccagacatgccagccgtcgacaacatgttcaacagcgccgccgacgaaaaggcctcaaaaccagatcctacacttgaatactcgagtttgttgattgctaaacccctgccgttcaaattcaacatgaagatcaggaataagaagaaggctgaatatgtcgcgagagaatggatgttttacaagatggatggcgagtttgaggattcgaagtgttattgggaaggtgggaatgctggaaacaagatgtatgggtggggtgaggtgcacaaatga

SEQ ID NO: 2444 - DNA, 1242 bp, Aureobasidium pullulans; identical to SEQ ID NO: 2057

SEQ ID NO: 2445 - DNA, 1380 bp, Aureobasidium pullulans
atggatgctatgctgccgtctctcggaagctccaagaaggctctccttcttggagctggtttcgtcacccgccctactgctgagatcttgagcgacgccgacatctcggtcactgttgcctgccgtaccctcgagtcggccaagaagctctgtgagggcctcaagaactgcagccccatctctctcgatgtcaacgactcggctgccctcgagcacgaggttggcaagaacggcgttgtcatcagtttgattccctacacctaccacgccaccgtcatcaaggctgccatcaaccagaagaagcacgttgtcaccacctcatacgtctctcctgccatgctcgagctcgacgccgaggccaaggaggccggcatcaccgtcatgaacgagatcggtcttgaccccggtatcgaccacctgtacgccgtcaagaccatcgacgaggttcacaaggccggtggcaagatcaccagcttcctcagctactgtggtggtctgcccgctcccgagtgcagtgacaatcctctcggctacaagttctcatggagcagccgtggtgtccttcttgccctccgcaaccaggccaagtacttccaggatgacaagatcgtcgaagttgctggccccgagctcatggctactgctaagccctacttcatctaccccggctacgccttcgtcgcctaccccaaccgtgactcgaccccttacagagagcgctacgctatccccgaggctgagaccatcatccgtggtacccttcgttaccagggcttccccgagttcatcaaggcccttgtcgacatgggcttcttggaagacgccgagaaggagttcctcaagcctcttgccgacgctcctaccctcacgtggaaggaggctactgcccaggttctgggcagcagcggccacaccgaggaggacctcgtctgggccattagctccaagaccagcttcgccgacaacgagcagaagcaccgtatcatcaacggtcttaagtggatcggtctcttctcggatgagaagattgagccccgcggcaaccctctcgacaccctctgcgccaccctcgagaagaagatgcagtacgaagagggcgagcgtgatcttgtcatgctccagcaccgcttcggcatcacccacgccaacggtgccaaggagactcgcacctctaccctggtcgagtacggtgaccccaagggctacagcgccatggccaagctcgtcggtgtcccttgtgccgtcgccgttcagcaggtccttgacggcaagattacacagaagggtgtccttgctcccatgagccccgagatcgttgagcctttgagactcgagctcaaggagaagtacggcattgagatgaaggagaagactctgtaa

SEQ ID NO: 2446 - DNA, 1761 bp, Aureobasidium pullulans
atgcattcgcccttctggactatctcgactgcagcagtctgtgtggctgtcgctcaagcgtcatctcttgaagatgtttgcacttcagcttatgcagtcgccgctttacctgctgcaaacttctatcaaggcattaccattgacaatgcatctgtgactgccaatccagtttacgccgccaatgccagcggtaatgtcatgtttccggactctacttttgattactgcaatatcagcttctcttactctcatgatggaattgagggtgataatgtgaggttggtttattggttgccttcgcccgataacttcaaggatcgctttttgtctacgggtggtggtggttacctcatctcttctggcgatggcttatctggctcgcttcctggaggcatcgtctacggtgctgctgctggtaccactgatgccggatttggcagcttgtctacccaattcagcagtgtcttccttctcgccaatggcaccgcgaactttcacaacttgaacatgtttggatttcaagctatccatgagatgacggtgctgggtaaggagtttaccaagggcttcttcaacatgaccaaggacgacaaactatacgcttactaccaaggttgttcagaaggtggtcgcgatggctggagccagatccaacgctacggagatcaattcgatggcgccgtcgtcggtgcccctgctttccgcttcgctttccaacaagtccaacacgcatactccgacatcgtggagcaaacactagagtactatcctcctccttgcgagatggaaaaaatactcaacgaaacaatcaccgcttgcgacccgttggatggaaaaaccgatggcgtggtcgcccgtaccgatctttgcaaattgcacttcaacactagtagcttgattggcacaccatactcatgcgctgcttctcctgtgtatatgggattcccacctcatcctgcttggccggcgcaaaatggcactgtcacggcaaaggcggtgcaggtggctgataccattatccaaggcctgcgcgactctcacggcaaacaggcctatctatcctaccaacccgcctccatcttcgcagacgcattcacccaatacgacaccaacacatcctcattcaccctctggcccagcgatttcgccgcacagttcgtcttacccttcttggacttggtcaacgcaacttcctttgcaaatctggataatgtcacctatgatacgctgaaacaatggatgtacgaaggctggcaaatgtacgaatccactctccacaccacctggccagacctttcctctttccactcttccggcggcaaaatcttacactatcatggcgaatctgatttttccatccctactggaagttcggtacattatcgcgattcggtgcgggagatcatgtatcctcatctctccttcaacgcttccaatgcagcgctcaatgagtggtatagactttttctcatccccggagccgggcattgtggattgaatgcttatcaacccaaccatccattcccacaaactaatctgcaggtcatgattgagtgggtggaaaaagagattgtgccgcagactttgaatgcgacggtcttgcaaggagagaggaagggagagaacgagcaagtgtgtgcttggcctttgagaccatcttggagtaagagtggtaatgggactgtggagtgtaggttcgacagcaagagtttggagacttgggaggtggagtttgatgctttcaagatgcctgtgtactga

SEQ ID NO: 2447 - DNA, 1335 bp, Aureobasidium pullulans
atgaagatatactttcttttaccctctattctcgttgcaggcgcactcatgacaggctttgcccgtgctgtcaatgcacgtctcagtgcttgcggccagcagcatgcctcatgctatcacctcggaatctttgctgacttgtgcgctcgactgtcagaacacaaccatccacgctgcgagtgtggctacacaatcaacgctaccagctcttcaagtcccttcgccctcttcaccgacctcctggaaaccgacttcctacatctttacaacctacctgacagtattgatgtacccgcctcggatgccgttggttgggccgtacaagcatacaatatctcacccttagtcgccagaggtcccttcggtaaagctgctgagatcgacaatgttgtcctaaacccactatctaggcgtaaagactggactggcaatggaacgctgggcggcgcccctggtcttcaggtctgggtcagaaatcagcaagatctacttggacccgtcggtgaccagatggttcggaccggcgaaatcaacagtctacgccgggacatgcgatatgggagcttcagagttgccatgaagatgagcgatgttccgggcacctgtgccgcgttcttctggtaccgcaatgactcacaggaaatcgacatggaatatctcagccgacaagccaattacgagtccgccaacggcttatctcccataaatctcgtcatccaatcgccagcctctgcgagtgcaaactacaacgccatcaacacaagcacttaccgcctcgagactctgccctttcaacccagcgaaggctatcacgagtatcgcttcgactggacaccagaacgcatcgttttcttcgccgacggtaaaccactctcagagttcgagaacgctttcgacggcgatgctcccgatgctcccggaactatgatgttaaatcactggtccacaggcaatgctggttggagcggtggtccaccagctcaagatgctgtccttacagtcagctacgtgaaggcctacttcaactcgagtaacgcaacacgagagagccaatggaatgctgcttgcggaggcgaggtctggcgcaatcgcacttgccaaattccagactatcctactcagggcattgacccacaacgcatgggaatgaaggacccaggcaagagttacttcttcatgtatgatgaatactgcaccgtcaaccaaacgctgtacccagctgccactggcggaccaagcaaatcgaatggtgcttctcctctactgtcgacgccggaaacgtggacgatactcggctggacggcgatattcggcctatttctgcttgctagttga

SEQ ID NO: 2448 - DNA, 966 bp, Aureobasidium pullulans
atgaaatccttcttcgtttccgctgctcttgttgctgcagcagatgcacttgttgctcgcgactctccatgctgcttccatttgactgcctctggtggtcctggtggcgttgtcggtcagctctctgatggtcagaaccgcattggacaaggcttacccggtgctcaatattgcattgactccaagggtgggctcactgatggcaatggtcgtggctgcattttgacacctcctacaactcagttccagtgtgaccagggtgccagccccacggatggattttccgtcggttgtgatggcaagctctcaatcaaaggcaacactgacttcaagtcttgcccaactggtgacaacggaggatacaacatttacaccactgccccagctggtcaaggtggctgcgtctccgtcaccttgagtgcggataactgcaaatccggctgccctgctccagctcccgcaccagcccctactcccaagacttgtcctgctgctctgactggtgcctacgagtaccctcatctcattgtcccggtcgactctaagcaggcagacaaggcgttcggtacttcttacaacggtactatcactagctctgtatcgagcttgttcaacttcgatatccccagctctgattccggaaagacctgttctttggtcttcttgttccccgagcagaagaatcttgagacttcttcgttcgacttctctggcgctgggggtgtcgacttcacaatgctgaaaggcactgccagctccagcaccacgtacaacaacaagcctggcgttgccactgattacggtgtgaccaaggtttcccctggcacgtcgtcggtggttgcaacattcgcctgcccagccgggtctgctatcggtttcggattgtctgcatcggacggtaccatgctttcgtatttccaggactacaacccgtctcccatcggtctttacatcaccaagtgctaa

SEQ ID NO: 2449 - DNA, 1749 bp, Aureobasidium pullulans
atgtcttcttccaacccatcaaggcatttcgccttcgccttgctcatccctctggtgctggcagcagcaaattacgcttctctacaccaacaagtcttgggatttctcggctaccactctaccatctcttctctacctactgttaatatacctcaaactactctggttggcacaatcatcgataacgccttcccaacaccagtggaagcatttcttgggtttccctacgcagccgctccaactggtgctttgagattcgccaaacctgttgccatacagcctggaaatgggaccttcaaagccgatacttttggtcccagatgtcctggaaaacaactacttcctcctggtggcggcgaagatatttggtctgaagattgcttgaccgccaatattttccgccctacctctttgctcaaggacaaaaaagtacccgttatggtttatatccacggaggagcttttaatcgcggtacggcgaagatgcataatacggcttctatggttggatttgcgactgaggctttcgttgccgtcagcttcaattataggattggtgcccttggctttctgaactcgaaagttacggaaaaggagggagtgttgaatttggggttgcatgatcaggtgctcatgttggagtgggtgagggataatatcgcggcctttggaggtgatgagggggatgttacgttggttgggttgagcgctggtgcacactcgattggccatcacatcatgaacatcaactccccccatcaatatcccctcttccacaaagcggtaatcgagtccggtggccccacctctcgcgcccttcacccttacgactctgccctgcatgaagaacaattccagatgttcctcactctgacctcctgctctgatctctctgacaccgcgatcatcccttgtctccgcaatgcctccgaagcaagtatagtggaagcttcaaacaaagtatttgctcgttggaacccttccgtcagatgggcatggcaacccgtcatcgacaacaacttaatctcccgacgccccctatcagcctggaagtcaggaaactacgccaacgtgcccattctcactggcttcaaccacaatgaaggaacaatgtatgtacccaagaccaccgccacatccgcgcaattccgcaatttttgggccgaactgcttccgcatctgggcaaggaggagttgggtattatcgaacaactctatcctgatcctgctgtatatcctcattccgaatatctcgataccagaggtttggatgtcggcgcgcagtataaacgcttggaagccgcatatggccattacgcatacgtatgccctgtgcgtcaaaccgcgaacctgtccaaaacaccaatgtatctataccactgggccaccaaccgcaccgtcctcggcggcgccaaccacggcgatcaaatgtggtatgagaccttcgatccatccaccacttccgtctcttccacgcacgaagaactcgctggcatgtttcatgattacattgtcagttttgttttgaccggggatccgaatgccgtggaggggaggtggaagcgaccggtttgggaagtgtggggtaagggaggagggcaagggcacaagaccatggtatttggcgccggtaatgatgagcgtgctggtggaaagggtaagggtgttgtagcggaattgctcaatgatacctggggctccaaacaatgcgaattctggtggtcgcaaacccctaatgtggaagattag

SEQ ID NO: 2450 - DNA, 1113 bp, Aureobasidium pullulans; identical to SEQ ID NO: 2063

SEQ ID NO: 2451 - DNA, 1332 bp, Aureobasidium pullulans
atgtcatccatcgcccttcttgccctgctcggcactgtggcctcagcagccaaggtctgcaccaatgtcactgtcccagtctacatcaacgccagacaggccgtcttcaatgttcctacccttgagtcgaaccttgatgccaccactttcgccctcaacttcaccaacattggcatgaacttcaccgatgttgtcactactggcttccaaaccgtcactggacactacaacatcagcgccaaatactgcaagcctcagggggacaacaaggccaaccccgttgtacaagtcttgacacacggtattggtttcgacaagagctactgggacttgtcatacgacaactacgcctactcttatgttgacgtggctgttgctgctggttaccacactgtctcaattgacagatttggaattggcaactcatctcacgccgatcctctcaacatcgttcaggcccccgctgaggtttctgccctgcacgagatcaccacaatgctccgtaacggtaccttcccttcggtcagccacaagtttggcaaggttgtacacgttggtcactctttcggttctctccaaagctatcttctgacagctctctaccctggctcttctgatggtgttgctcttactggcttctctatgaatgccacttggctcggccagactcttgctgactggaacctgcacctcgctcgtctcaaccagcctctccgtttcggcaaccaggctatttcacgcaccaagaccaacactgcttggctcggacagaacgtcatctctatccttcagtctgctcttggtgctgtcggtatcaacctttcaagctacgagctttgggaagaaatcgccactaccgaagttggtgacattattaacggctggaatgctaccgtggctcctgttgcacaaaacttgcccactggctacctcacttggagcgaccttacatcaaacatttttgccttcctgttccctggccacttcgatattggcgccgctgtctacgctgagatgaccaagcagcccgtcgctctcggagagattttcaccctcggaaatggtgctcccgcatcttctccccacaccggccctgctcttgtcctgaccggtcgccaagacaccatctactgcggtggtgactgtctcgctactggtggtgccgctgctagcattcccgctggagttgccaaagctttccctaatgccagcaagttcgaggcttacattcacccaaacactggccatggaattaacttccacaagaatgccaccggtgcctaccaggtcattcaaaacttcttctcctccaacggtctccagagctcatag

SEQ ID NO: 2452 - DNA, 1608 bp, Aureobasidium pullulans
atgtcattcaaacatatcgttaccctactttccggcctcgccgccttgtctgcggcatcgcccttggtcaacgcgcatgcggctgctccgactgtcaccattgcctccggtgtgatcattggaactgctactggtgttctcaatcaacctactgtgaccgggctcgtaaatgcctaccttggcatcccatatgcaagcccacccaagaggtttgaagcacctgttcctgcaccagcctggaacacatctctcaacgctcagaaatatggtgctgcttgtattcagcagttcaatggttcggttgttggccccttttccgaagattgcttgttcgccaacgtctatgtaccccccaacaccacggcgtcaaaccagaaggcagtgatgttctggattcatggtggtgatttggccattggcgcctcttcggagacgacattcaatgcaagctctctagctgtaaaccacgacgttatcgtcgttaccttcaactaccgtctcggcatcttcggtttcccaaactctcccgaccttccaacatcccagcgcaacccaggttaccttgatcaacgtcttgccttgcagtggactcgagacaatatcaacgcttttggtggagacaaagcaaacatcaccatattcggagagtctgccggtggttactctgtcgctcaacttcttgcaaacccacccaagcctttgcccttcgtcgctgcaatcatggagtcgcctctgatcctcctgcccggtaacggtactaagaactggaacaacgtcagcgcacactttggttgcgctactgcgaactcatctcttgagtgcctacagaaagttgatgtctcggatttgagtggctacatccagagcagtggaattggtcttctttggcctccagcgatcgatggtgccactcaggttgagagcatctcggacgctatatctgccaagtcttttgctcatgtccctgtatacatgggcacgaacactggagaattcgacggtcttctgaagactctgggcctcggcaaaaacatcaacaacaatgcgactgaacagctgttcgctctcttcggattgaatcttacttcgatcacagagcttctggcacccaagtatcctcagaagcttgctccagtggatttggttggacagatcctcacagatctgttcttcacctgcccagtggccaagttctcacgggagctcgccgccaaccaatacgatacatggagatactggtatggattggtcactcccacctttggctctgactatgctgctcatgcctcggaagtaaaccaagtcttcggatcctatcctctacagaacgagaacggaaaggccacaagcgatcaaatcaaattgagcgcattgatgcagacagtctggaccaactttgccaaagacccacactgtggccctggatggcctcagatttcgaccaattccataaacaacaagtttggcttgtttggtggtgttcgcaattcgagtggcctgcagatcattcctactttgacagctgactttgcttgtggtatgcttgatggtgttgctactctgagtaaagctggtgtgttggaggtcaacactccattcaagatctga

SEQ ID NO: 2453 - DNA, 435 bp, Aureobasidium pullulans; identical to SEQ ID NO: 2066

SEQ ID NO: 2454 - DNA, 1755 bp, Aureobasidium pullulans
atggtctccaagtacgcagccttgatggctttgatcggctctgttgccgctcagggttactcaaacagcagttcgattgcttcgactacctcttctgcctctggtgcagcatacaccaacggtgctgagcccaccgtgggaggcacaactttcctcatccagaccgacaccacctacagtgatgccactgtcctgactctttcgagaaagagacaggcaagctctggaattgcctcttgcttggctacttgctctgacagcgatcgttgtgtcggtacctcgtactcggacgacactatgcaatgcacatactacagcagcattgactcaacctcgagcactccctcccccggcaccgactttgctcttgtccaggaccgtgctacctcttccaccacctcggatgtcttcaacggcactacccctgttacttctggatctccttccaccagaacttccggtgtttcggtttctggtgccaacaactccactactcgtgccactggtagctccactcgctctgctggagtctctggagtcaacaactccaccactcgtgccactggcagcgcatcgcgtacttccagcactgtctctcgcacttccggttctgtccccaccagcgtcccctcctcgctccttaccatcaacggtgttctcttcctcattgagattgacatcaactaccgtggtattactatcgacttcgccattctgtccaagcgtgctggtgagaccctcgaccagtgcttgaccacctgcgctgccaacgctgcctgtgctggcaccggtttcgaggacggcacctgtactttctacagctccattgaggacggaagccgtgttgttgataccggaaacactttcgccactgtcatctctcgcgctggagccatcggatccggaaacaatggaaccgcccctggtgttaacggaaccactcctgctcccgccagcaacgtcaccgccgagtctcttatctgtcctcaattcaacggtcaagtcgtaacttcttccgtagatgttaccttcgccgtcagctgtagccagttccttatcggcacgacttttgatattacccctgaattgttgagcaagcgccaggccgtcgacactggacttccccagaccatctctaactgcatcgatctgtgctctctttccgagagctgtgtgggaactaccttcaacattgcacgctctgagtgcacctactactccaacgtcgattattcaactgagttggctggcttcgattcggccactcgtgttcaggacaactctgatggaaacggtgagggctctgtcaccaccactactgtcgtcgcccccggtgtcacatctaccgtcgtcgttggcgccgctaccaccgccactgtctacaccactgtcgtaagcactgttacagtctacgctggatccgattcaactgccttcccctcgggagccgtcgtcacaacaatcttccctgtcggaacaactacctatatcaatgctgtgcctaccatcacccttcctcagcagcaaaacaacgccgtacctaccgtgacagtcactgtcggatccggagctgctgtcgagacctctgtcgtcactgtcactgtcgactcaaacggcaacgtccttggttcttccactgctggtgccgtcgccggtggcgccgctggagctgcttacccgaccgtgaccgtctaccaaaacaactgccctacccaggctgcgcctgtaacttggacaacggttttcgtgagatag

SEQ ID NO: 2455 - DNA, 1548 bp, Aureobasidium pullulans
atgccttctccagtggtgattggtgttgctgctcttgtggtatttctcgttgttcgatacctcaattcgtccgacattcccagaatcaaaaatcttcctgagattcctggagtgcctctgtttggcaatttgcttcaattgggaaccgaccatgctctcgttgctcgaaagtgggcgaagcaatatggtccagttttccagacccgcttaggaaacaagcgtattgtgttcgcaaacactttcgattccgtcaagcacttgtgggtcacaaaccaatcagcattgatctctcgacctaccctgcataccttccacaccgtggtttcgtcctcgagcggattcaccatcggaacctctccatgggatccaagctgcaaggaacgaaggaaggcagcagcaaccgctctcaatcgtcctgcagtgcaaagctacatgcccttcatcgattttgaagcaacaagatcgatcaaggagatgcttgcggactcgaaagatggtaccatcgacatcgaccccaatccatactttcagcgatacgctttgagcacgagtcttaccctcaattacggcatcaaaattgaaggcagcatcgacaacgagatgctcaaagaaatcactcatgttgagcgtgagatcagtaacttcaggtccacatcgaacaactggcaagactacatcccgctgatgagactttggccatcgaacaacaagaagccactcgagtacaagcagcgtagaacagcatacatgacgaaattgctgaacatgctgaaagagaagattagaaccggtacagaccgaccatgcattactggcaatattctcaaggacccggaagcgaagctcaacgatgccgagatcatgtccatctgtcttacaatggtcagtgccggcctggataccgttccaggaaacctagttatgtgtttggcatatctctcgtccgagcacggtcaacagatccagaaacgggctcttgatgagatcaacaaggtatatccgaacggcgacgcatgggagaaatgtctggtcgaagaaaaggttccctacatcacagccttagtcaaagagactctgaggttctggtccgtcatcccaatctgtctgccacgagtcagcatcaaggatatcgaatggcaaggcgccgtgattccctctggcactaccttttacatgaacgcttacgcggccaactacgacgaatcgcacttcacgaaccccttcaagtttgagcccgagagatatctggacaaggagatgtcaggtatcgagcacttcggatacggagctggcagtcgaatgtgtgcaggcagtcacttgggcaatcgcgagctgtacactgcatttttgagactcatcacggcgttccaattcgtgtcaccgaaggatccaagagacagtccagttcttgatgcactggatgcgaatgctcttcccaccagtcttaccatggaaccaaagccattcaaggttggccttcgcgtgcgcgacaggcagcagctagaccagtggattagagagagcgaggacagaacagcagatctttga

SEQ ID NO: 2456 - DNA, 846 bp, Aureobasidium pullulans; identical to SEQ ID NO: 2069

SEQ ID NO: 2457 - DNA, 978 bp, Aureobasidium pullulans
atggctcccaaatcagcaactctgctttcagccctcctggcagccagcaccgtctatgctgctcccgctcctcttgagaagcgtgccgattgggtgacagcgactatcgatggagctgtcgtctcttgggagaacaactggaacgttcccgctcagtcaactcctcctgctgttatgcccgccccctcggctgcctccaacaacgacggccagtggattacggccacctacaacggcgccacattctcgtggcaggcgaatgctcctactgctgcaccagcttcttctccagtctcgtcacctgcacagcctactgcagctgcccctgcacccagggtcacaaacaccgacccctcatgcagagacgtccacatcttcctctccaagggctggaacgagccctaccctggtcgtcagggcaagcttgctggtgccatctgctacggccttgactcttgcgattatgaggacattctcttctacaacgctgagggcagtgactactgcaccgctgtcaaggagggcgataacaacggcatcaaccagatgaccgcctacgctaagaagtgccctgcctccaagctcgtgctgtctggctactctcagggtgccaacgtcgctagcgatattctcggtggttccgacagatgtggtggccccaaccccggtcttgacccctctaccagccctggtaaccagctcaaggctattactctcttcggtgacaccagacacgtcgccaaccagccctacaatgtcctcagcggttcatctgagagctccaccgacccccgtaccaccgaatctctcaaccgcatgaacaagttctctagcatcatgagatcttactgcgaacacgccgaccctgtctgcgcttctgccggccccggtcctttcgacgtcgacaagcacctcaactactttgacctctactctgacgatgccgctggctggatcaagtacattctcggctattaa

SEQ ID NO: 2458 - DNA, 1281 bp, Aureobasidium pullulans
atgtctatccgttcgctactcagcttcggcttgctggccgctcctttggtctctgcactgcctgctgcagaccacaagtcaacctcgtgcagaaccagcaccagtacttcccactcgacttcgcactcttcctcccactcctcgactcagacttcgacacacagccctgcaacttctgctgtcgtcaccaccactaccagctctgcttccaacactgttatgaccacaactttgttggcaacagctactggcaagacgggcttgaatgactacgcaaagaaggccggcaagctgtatttcggtacagctgcagatgttcctggtaccaacgagaccaccgacaaatactaccgcgcagaacttgccaacagggatgactggggccaagttacacctgccaatgccatgaaatgggtcttcacagagcccgagcagaacgttttcaactacaccgaggcggacatcttccttagggatgctgctcctcctggaagactggtcagatgccacaacttgaactggtacaaccagctccccgagtggctcacttctggcacatggacaaacgagaccttgaccaaggtcctccagaaccacgtcactaacctcgtcgagcactttggcgaccgttgctacgcttgggatgtcgtcaacgaggccttgagcgacagtggcaccggtaacttggccgacaactccacctggagatcggatatctggtacaacaccatcggtcctggttatgttgctattgctttcaaggccgctgaagctgctgttaaggccaagggcctcaatgtcaagctctactacaacgactacaacattgagagtgccggtgccaagtccactgccgcacaggcacttgtcaagagtctcaaggatgcaggaatccagattgacggtgttggactccagtctcacttcattgtcggagaaactcccagcaaggccgctcagatggccaacatgcaggcatttgccgcacttgatgttgacgtagccatcaccgagcttgatatccgtaccactacgcccgccactgctgcagctcagcgacagcaggtccttgactacgccagctctgttggtgcctgcgcagacgtagacgcttgtgtcggtattgctgcttgggactttgacgacacttacagctggatcccctcgactttccctggtcaaggctatggtgatcttttcttccagcccggaggatacaacactccgcttgtccgcaaggcagcctacgatggttgtattcagggtcttaccagctcataa

SEQ ID NO: 2459 - DNA, 2100 bp, Aureobasidium pullulans
atgttgctctcaagtgttgctctggcggcctttgttgccacagccaatgcccttaatcttcaagtcgctgctagtggcggtaatgctacatcccctctccagtatggattgatgtttgaggacatcaactattcaggtgatggtggaatctatgccgagctcatccgtaacagagcattccaaggcagtactgagcacccttctactcttctggcctacaactcggtgggaggtacatccctttcgctgaagaacttgtctcagcccatctccagtgctctgcctacctccatgaatgttgctgtagccaatgccacagacaacgaagttggtttctcgaatactggctactggggcattggtgttcaggttcagcagtacactggctctttctgggtcaagggatcctacaaaggcgaattcaccgcatctctgaaatctgacatcaccaacgagacatttgctactgcacaggtgcagtcgcaagcctctcccaatgaatgggttcagcacaactacaccttcacccctacttctgccgcgccaaactcgaacaactcattctacctgaccttcgacaagtctggtgtcactggtggatcgcttgactttaccttgatcagtcttttccctcctacctacaagaacagacctaacggtctgcgtgttgacatctccagcgcattgaaggcgctgaatggaaagttccttcggttccctggaggtaacaacctcgaaggagacaccccaccctacctctggaagtggaacgagaccatcggtcctctcaaggacagacctggcagacctggcacttggggctacgagaacaccgatggtttgggtttgattgagtatctccactggtgtgaggatctcgagcttgagcctgttcttgctgtttgggatggcttctaccttggcggcccagtgactccacaggatcaactcgaaccttggatccagttcgcccttgatgagctcgagttcttgatgggttcgaccagcaccaagtatggagcactcagagcatctttgggataccctcagccattccagatcaactatgttgagatcggtaacgaagacaatcttggtggcggaaactccagttactctgcttaccgtctccccatgttcaccagtgctatcaaggcagcctaccctgatatcactatcattgcatcaacaaccaccgttgacccgattcccgaccacatttctcttgactaccatgagtactcgagacccgataactttgtcagagagttcaacctgttcgatcactacaacagaaaccatcctatcttgatcggcgaatacgccgtcattgagggcaacaacgcgactatggctgctgtggactggagctcaaacagagaaagattggccttcccatcttgggagggtagtgttgctgaagccgtcttcctcctcggagctgaacgtaactcagacatgataatcggcgcatcgtatgcgccaacattgcagaacttgaacagctaccagtggactccagacatgatcagcttcactgcagaccccaccaaggacgttctgtcaacttcttggcacatgatccagctcatggctaaccacattgtgaccgagactctgcccaccactggcggcaacttcggacccgcctactatgtagcaggatacaacaaccagacaggatctcacatgctcaagacagccgtttacaacgctacaagcgatgttcccgtctcggtgtcgttcaagggcgtctctgcaggggccactgctacgctcacagttttgactgcaccaagccatgatagttacaacgctcctggcaagccggaagttgtgacatcgaccaacacgaccatcacagcatctgctgatggcacgttcaagttcgagctccccaacctcagtgtcagtgtgttggaagtgcagggcagatcaacatactgggcaggtagctggggtggaccgcgtggtgcgtggggtcacggtgggttcggaggatggactcctagctttggtagctgggggttgaacaactggaaaggcacagggcacaacaagagagcaatccccaagggctacaaggaggtcgtcttctag

SEQ ID NO: 2460 - DNA, 5862 bp, Aureobasidium pullulans
atgagggcttcaattttgtccaccatgattggtatggctgcactcgcggcttgccagaactcgacaattacctcgtcatcgaccttcgcctcttccaccactttgctcgttgcatcgagctcatcgagttcttctttcatttcatcgacctcatcgacgaccgcctcttccggaacttcttcttcaattactgcaatcacagtcgccctcgatggttcagctcaattcactgctatcaatgctgctgtcaacgctgctcagaacagtggtgtcccgacagttgttgtcaaagcgggcacgtactcagaatctattgctatcagtggaactcagaccgtgacaattcttggcccaactgcttcctcctttgcacagaatcaggtcaacatcgttgcaagtggtactaatggtgtcgtgaacattgctacgtccaatacacaaggtatcaccctgaagaacttgaacttgaccaaccttgccacatcgaactatgctcctgctgtatcaatcagagggtctaagcatggaatctacaattgtgccttagtctcgagcagctatggcgtctattactcttcatacggatttgctctgatcgcttcgagttacatcgaaggcacggacaaacttttctacaactatcctacggcttatgtctacggctctaccatcgttcccaccacgtccaacgctttgattatgtacggcaagggcaacgtgaccactggaaacgctactcttgtggtcgactccagctctgtggttcagaaagctggattgactaacacctatgtgtaccttgcggcgcccaatggtaactattcacaagctatctaccgtaacaacaatcttggaagcttgattgcgcctagcggattctacggcagtacttgcagctctgctgtgttctatggagaattctcgaactctggtgcaggggcctattcggccaatgcccaggccagagctgcggtttgcgatgttcaattgtccgttgctcaggtctctgccttcgctgtcgataaagttttcggaaatgcgttcgctggttacagttcatttgacaccacctggatagactccaatgtcttgaccacgattcagaaatcagacgccgctcagatagctgctgcctcaagctcctctgtctctagctcctctccttcgacctcatcagtcttaagctcttctgcttcgggctcatatgtttcgagctctgccagtagcttatcggtgaacatgactctgtcgtctgcatcaacactcccaaacagcatttcaagcagcagtaccgcgtctgtctccagttcaagcacatgcgctacgcctgctccatctgcaactcttgtagtatctcaaaatgctacagcctgccagtacaacaacatttctgccgccattgccgctcttcctaatgacagcaagccttacaccatctatattgagccaggcgtttataacgagcaaattagcatcaccaggaacggcaaggtaactctcatgggtgcaaccagcttcaaaaatgactacagtcagaatcaagtcaaggttcaattttcgagtggtcgctctaccagcgcgggccaggacgagcaaactcctgtcatcaacgcaaagaagacgaacgacaactctggtctggccttgtataacattgatttcatcaacagctaccctcagactgccaatactgccgctcttgcagctgacttctatggcaacaacatggctgcttatggctgttccttcattggtttccaagatactcttctcgccaacaagggcgttcaagtcttctcgaatagctacgtcgaaggctcgatcgactttatctggggctttggcacagcatatttctaccgatctgtgattgctactaacaccaaaggcgcgtgtgtcactgctcaaggccgtgtcgtgactactccagctgcttacatcttcgacgaatgtttcgtcacatacacctccacttatggaagcacattcggcgccagttacctcggtcgtccctatagcaactattcgacggttgtatataagaacagttacctagacaagcatatcaatgctgctggttggcaggtctggtcaaccggaaatcctcagacttccaatgttacgtttggagagtacaacaacactggtcccggagcatgggtttcgggaactgctcgtgcttcctttgccaccaacatgaccgatgatcaggttgcaggttacagtctctcaacttgggttggtgacatcagcttcattgaccagactgcctgggcctacgagccgtcctggagcttccctgcatctaccactactggcagcgctagcagcacctcttcgggtgttcccggtcctaccagtacctcgtccatcaatgctcaccctgaaagcggtagtattcctcctcaatatgccgtcatcgtctcggccgatggccaacacaatgcttcattcacaaacttgacggctgcgcttgcatctctgcccaatgatagtaccaatcagactatcttcatctatgcaggtacttacaacgagcaaatcccttcaatcaaccgtcctggtgccattcgtgtcattggatacacttccggtagtcctggacagagctacaaggacagctctgtgactgttacctttgcacgtggattatccgtctctcctttgcctagtggtcacagcgatgcggaaactgcgaccatcgctactgcatcaaacagaatctcattctacaatatcaacttcatcaactctgataaccttgatggattggaagcaaattatgtgacgctcgccgcctcaatctacggtaatgacattggtttctatgggtgttctttcgaaggctggcaagacactctccttactggcgcaactactggttaccagtactacgagtcttgctacatttccggagctattgacttcatctggggctattcgaagagtttcttcaagggttgcactatcggggctaagagacaaaagtctgctatgactgctcagagccgtgcttcttcgtcggccattggtggctacatatttgaccagtgcctgttcacagctgctactgatgcaacagttgatcttaccgattcggtctacctgggtcggccctactctgcctatgcacttgtcgttgtcaagaactcatatctcgacgatgtaatcaacccatccggatggaaggtctggtcaactaccgatcctcgcactgactacatcactttcgctgagtataacaatgtcggtcctggatcatgggcaaacaatgttgcagctcgtgaagccttcggcaatgccactcttctgacttctgattcttactcgttagcgaccgtcatggatgacacagcttggattgacatgacttactggagttcgattgctacaccacagcctgcagtgatcaacactacaacctctaccaatgttacagtctcgggctcaagctcttacaatggtactgtccctcctagcggtgctctcattgtttctaagaatgcaattgatggtgtcactacttacgacaccattcaagccgctctcaacgctgcaccaacctcgagcaagaccaatgctactatcttcatctatcctggtgtttatgaagaacaattgatcgtcaacaagagcggcacaaccattttcatgggctattcagactcgaccgatgactacagccaaaaccaggttaccattcagcaatcttacggtgttgatacacaaggcactggaagtgatgtggatgccgcaactgtctatgcaactggcaactacttctatgcttataacgtcaacttcaggaacaacaacggcactcagcagaacattgcctcccttggcttcgcagtcaagagtagcaagtacgctttcatgcacggctgtcagatctatggtaaccaagacactctgtacatctcgggcaatatgttcaccttcaagagttacattgaaggaaatgttgatttcatcttcggtgctgggtcaggttacttcctcaactcgactgtctcgccgaatgaggacggcgattccatcactgctgccaagcgtgcaactaacactacgtctgctgggttcgtgttcgaccagtgtactattactcctgctgcaggctcttcaggcttcaagaacgtctcgctgggacgtccctggaacaactttgctcgtgttctatatgctggctgctatcttgatggttcagtcggctcagcaggttggactcaatggagcaagtcttcgccacagactgatggtgttacgtttgccgagtatcataactacggccccggaagcaacacatgcaatcgtgcaagcttctcggagcagctgtctgatgctgacgtcgctcaattccagttagccaacttcttccctaccacctcatggattgatttctctgtcgtcgatgttcagccttttactgctggcttcggatccgctcccgctggatgtgtcagttcttcatcttcttccttgctctcaacactgtcgagcagcagctccacgacattgcctctgatcacgacccaagttactaccaccattattcaaaaagcgacaacgtacactactcttgtgcaaggcgatattacttcgactgtcgtatcctacgtcacggaaaatgatggcactacagtgactcccgcgccgattctgaaaacttccatcgtcaagtcgaccgaagtcgtcacatctacaaccacaaaggcaggaaaaacgacaacagtcaagtctacctcggtcgttctagctactgctaccgcttctgctaaggatgtcacggtcaaacagacttcgatcgtctcaagcgaaacaaccgttgctggcaaggataccaccgtcaagagcactgaaaccgattatttcacgaccactgtcgctggaaagacctcaaccattaaggcgaccagcactgttctcgtgacttcaacatcttcgccgaagccagtcacgatcactgagagcatcggttctgtggtgaccgtttacgagacctcgactctcaagggttcaactgtcagcagtaccactacgattcaagctccagacgtcacatcctcgaccactctcaagccatcaaccgtgactgtctcgagcttctctgtcaagaccaccacgaagggaactactattacagcttcctgtgttcctactgcaggtgctgccagactcttcagaagaggtcttgaggctcgtgctgctggaaccacaacgattttcattagcaccactttgacctcctatgttaagacatcgattgtcaccagtgcaggctcgaccatttacacaagtgtgaccagcactagcacaattgcgccaaccagcacactcaaggcagccacttcgaccgtgctgagcacttcacttgcgacgtcgactgatctcgtgactgagagcgccgttgatgcgaccgcgacctcaatcatcttgtcaacttcaacgatcactgagaccgccgcaggaaatacggtgaccagcctggcatacagcaccgaatacaataccgtatctttgcctggaagcacttactacagtgtcgcaacagtcagctccactgacaagatttccgcatcagcagcaaccgtgactagcttcaagctgatttctagcactaccgtcgttactgctgatcaatctacattgacggtcaccaactctgcagattcgaccactactattgagacgacgcttcctgcatctactacgactgtcgtcaagactagctcgctcaagggcagcacgattgaggtcactgtgacacctgctcctacgacaaagacgacgacagtcaagagcacatctacagtcttcacgactgttacaaagactgcaaagaatgcacctgcttgtacttga

SEQ ID NO: 2461 - DNA, 2343 bp, Aureobasidium pullulans
atgagatactcactcacaactgcagctctggctttcgccatctgctctattgctgcccctgttgccaacggtggcgactacggttctctgtccggtacaggagctgcaggtgcttccggcaacaactacggctctaccgaagtctctccctctggctcggctggagttggagcaaacattggtggatctggatctagctctggatccgcagatgcaggtgcatcgggctcggcaggtctaggagccaacgcaggtgctagcggctccgcaggcctgggaggctccggacatgctggcgttggcggtgatcactctggccacggaggtattggtgcatctctgggtggtggtgctggaggccttctcggaggattggcaggacttggtcttggtcacgaaggaggcctatctgctggtctcggaggcagcggacacggatacggccacggtggcctgggcgctggtattggaggcagcgcttcgccttcaattggagccagcattggtggtgccgcatcgccatcagttggagccagcattggaggaggagctctgccatctgttggagccagcattggtgctggtggttcggcagcaccctctgtcggagccagcattggaggtgctgcctcgccatctatcggcgttggtctcggcggatatgctgctccctcaggctcagcatcattgggtggcttgggtgcaggacttggaggagccgggggtcttctcggaggcctcggcttgggcggaaatggctacggtggtctgggagccggagcaggattgggcggaagcggttcagccggtgccagtggctcaggcgacgcttctggaaacgctggaggcgatactcaggttgatgcttccggttccggtcccactccctcctacggcagtggcagtccctcgtctcccaacgagagctcttctcctgacagcagcgcaccctctggcactgaagctggagctgcatctggttctcccgatgatgcttcgcctgctccttctgactcctcagctgctcctagctacggctcagacagctcctctccttcaggcagctcgtcttctccctctgacagctcatcttccccctctgacacagacactgacgcagcatcggcttcccctagcgatgcagcctctgcccccacttacggcgagagcagctctgtcgcagacgcaaacggttccgctgcagctcctatgtacggctctgacagctcggcccctgctcccagcgagtctgctgtagatgctgcctctgccactcccactgatgcatcttctgcacctgcaacctctgcacctactcttcctcttgccactggcgcatctggtagcacctacaagtcatacatcaagcgtcaatcatacgacgcaggttcgtcatccggcggtcttggtgctctcaccagtggaagtggacttggtgctcttacgagcggacttggaggtcttagtggaggaagcgggctcggtagtcttcctagcctaggtggaagttctggaggccttggtgcacttaccagcggacttggcggactcacaggtgaaagcggccttggtgggcttgcaggtcttggaggatcgggcactggttcagctggcgctgcttctactggcaccgcttcgactttgggtggtctgggtgctcttggtaacttgggtggtcttggtggcgcctcgtcttcaggttctgctggaagctctgactcctcatctactggtactgctacaagtggttttggctccctcggctctcttggttctctcacaggtgctgccggcgctgttcctagcaatgatgttactggaaacactggatgcaagaaggtcacattcatctttgctcgcggtacaactgagatgggcactcttggctctgtcgtgggtcccggccttgcctcagctctcgtcaaggacactggctcctgcacagtcaaaggtgtcgattaccctgccgacgcagccggcaacgccaatatgggagcctctggcggccccaagatggccgctctagcaacccaagccctcaaacaatgtcccgacaccaagatcatcctcggcggctactctcaaggcgccatggttgtccacaatgccctcggttccatcgatggctccaagattgctgctgtgactgctttcggcgacccaatgaatggccagagctttaagggcgttgatgacagcaaggttgtgagatactgcgggtcttcggactttgtctgtgacttgactggtaagactcagggaactgggtcgcatctttcttatggatccaaccttgctgaggctgcttctcgtctgagccagattgttggtgttaaggcttga

SEQ ID NO: 2462 - DNA, 1719 bp, Aureobasidium pullulans
atgttcagacaactatcgatagccgctgtggcactgtcactggcatccactcaagtttcggctaagcctatccaacgcagagcagctggcgattcggcatttgactacattgtcgttggctcaggtcctggaggtgtcacagttgccgacaagctctcagaaagcggcgcatcagtattgttgatcgaaaagggtcaagcgacgacaggtcaatggaacggcaacaacagacctcaatggttggacaacacaggcttgaccttctacgatgttcccgctctggataatatgatctggacacagggtggctcatttacaaacgatatcttctgcaacgacattgttggtggtatctcgggctgtgttcttggtggcagtggtgctatcaacgctggtctctggtggaagccttcatcctgggattgggatactttgttccctgagaagtggagcagcgccaacatggccaacgtcactgaccgcgtcttctcccgcattcctggcactgaggttccctctcaagatggaaagctctactaccaacagggtgctgatatcatcgagggtgctttgagcggcgcaaactggaccgaagtcagcgccaactgcgctcccgatcagaaggacagagtttactccaacactaccttcatgtaccagaatggtgagcgcagcggacccatgtccatttaccttggatctgcctacgctcgccccaacttctccctctacaccaacgccatcgtcgacagagtcatcagagaaggttccaagattaccggagttgaggtttcgaacacatctcccgatggcttcagaggcaccgtcaaggcaaacaaggccgttgtccttgctggtggcgcgttcggtacacccaaggttctgatgagaagtggaattggtccaagagatcagctcgagactgttcgcaacgccgaaggctcaaagatgatcagcgaggaccagtggattgacttgcctgtcggctacaacctgatggacaacatcaacaccgacattgttgtttctcaccctgacgttatctactacgattttcctgatctctggaacaaccctaaccagggagatgtggatgcttacctcaatggtcgcaatggcatgcttactcaatcgtcttctaacctcaatcccatgatctgggagatgctgaacggtaccaatggtcttcaaggcctgcagtggaccgctcgtgtcgatacctctctcaacatcaacaacgacgccaagcacaacatggtcctcgctcagtacatcaccattggccaagctgccagaggtcgaaccaccatcacctccgacctcaagatgaacgtttccaccggtgtgtccgtcatggaacacgaatctgatcaggtcgccattgcccagggtatcgaagacatggtaaacgtgctcaagaacgtgcccggtcttgagattctctctcctccttctggcatgtctgccttggactatgtcaagtcgactactcacctgtacgtcaaccactggttgggcagctgcaagatgggcaacgacgatggtcgcaaggagaacggtacttcggtcgttgatgcagactcgaaggtctatggtaccgacaaccttttcattgccgatggctccatcttccctggccagacaacctcgaatcctcaggctgccatcaccattgttggtgagcgtgttgcagagctcatccttgcactcaaccaataa

SEQ ID NO: 2463 - DNA, 1245 bp, Aureobasidium pullulans
atgcacttcgccagaaactctgccctagctgggctggctgtcattcctcttgcctttgcccagacctacacctcttgcaaccctatggacaagacatgccccaacgatactggacttgactcggctagcttttcctgcgacttcaccaagggcaagtcggctcttgctagttggagtgctgctaccgggacttcgctcacctacgatggaaccaagggtgctcaattcgtcatcagcggcaagaaccaggcacctaccatctcatctgacttctacatcttcttcggacgtgttgacgttaccatgcaagcagctcctggtgttggtatcgtaagcagtatggtcctcgagtccgatgatctggacgagattgattgggaatggctcggtggtgatagtacccaggcccagaccaactacttcggcaagggcaacaccacctcgtatgatcgtggtacctaccagaccgtctcatcacctcagacaatcatgcacacttacagcttcgactggactgaggaaaggattgagtggctcattgatggtgtggtcgttcgcactctcatgtacgccgacgctgtgggtggtcagaacttccctcaaacacccatgcgcctgaagttgggcaactggatcgctggcgacccagccaccaacgccgccggcactatcgagtgggctggaggtgataccgacttctctaaggctcccttcaccatgtacgtgaagactgttagcattaccaactacaacccagccaaggagtacgagtacaccgacaagactggcagctatgaaagcattaagctggttgacagcttttctggatcatcctcttcttcagcctctggcagcagcggctcggcttccagcagcgcaactcaactcaagcccactgccgtcatttcaaacagcttgaacactgtcgcgcctacctcttccatcagtgttaagaaggctcaggctcaggacagcgctgccgttgttgcaagctccaactcttcttcgactgcttccactatgaagtcagtcatcagcagtgtcagcgccagcgcgacctcggctgccgcatccgcatccgcatccgcatccgcatccgcatccaagagttcatcccacagctcttctgcttcagctacctcgagccagcctgcacagcagagtaccaacgctggtgtttccaacactgttgctactggccttttctcggttgttggcgccgcattggccctcttgaccctctaa

SEQ ID NO: 2464 - DNA, 1302 bp, Aureobasidium pullulans
atgtctttcaagatcgcagccgcagccgctttggctactctcgcctctaccgtctctgctcacggtcatctgcagagcatcggtgcctctggcaccgtttacgctggcttcaacaactctatcctgtactctaacaccaagcctgagctcattgcctggtccgataccgtcaaggacaacggttatgtctccgactacaccagtcctgacatgatctgccatgccggtgctgagaacgctaagctctctgcccccgtcaacggtggtgacactgtcactttcaactgggacacctggccaacctcccacaagggtcctctgatcacctaccttgctaactgcaacggtgactgcgctaccgtagacaagaccactctcaagtggttcaagattgatgccgtcggcatcatttctggagacagcaacaccggtacctgggcttccgacaagctgatctccgacggctacaagtgggacgtcaagatccctgacagcattgcttctggtaactacgctgttcgtcacgagatcattgccctccacagcgccaacaatgttggtggtgcccagaactaccctcagtgtatcaacctcgaggtcaagagctctggttccgacaaccctgagggtgttgtcggtactgagctttacactgctcaggacaagggtatctacgtcaacatctactatcccggtttcgccgccgatgagtacgacatgcccggccctgctctctacactggtggctctagctctggctctgcttctgcttcgtccgcctcttcgtccgctcaggccacttccgctgcttcgtcctcccaggcttcttacgccgcctcatctgctcagactacttacgccgcttcgtccgcccagaccacttacgctgcttcttctgctgaggctgcctcctctgtcgcctcatcgagcgctgcttctgtcactacccaggctcccgttgtctcatctgctgcctcaggtggcgattacgttgtcaccgcttatgagaccgatgttgttactgcctccactgccgtgaccgtcaccgccggagcttccgctactgccgcccctgcagtctccgagatcgcttccgctatcccctcgcagatgctgaccagcactatctccgctggtgttcccactggcactgcttcggccggtgttgccaagcccaccaaggctcttcccgagggcaccacccttgaggacctcctctcctgggtcgagtacctcttcgctgagaactcttctaaggcttccactaagcaccgccgtcacgctcgtgccttccactactaa

SEQ ID NO: 2465 - DNA, 2391 bp, Aureobasidium pullulans
atgcgtttccaaggtgtccttggtgcagctcttttgggctcatcagccctgcagcatgtcgctgcctctatgcagcccgatgtgcagggtgatcttgccaacaccgatggcgacatcatgaacgctgagcgtcttgagactcgtcaatcaacaggaaagatcccggttactggagtcactggaaatggtatccaggttagaatggagattcgtaccatgcagcaacagtatcctgacatgttcaatgtcttccttctgggtcttcgcagcttcatgcagatggatcagtcagatcctctgtcttactaccagattgccggtatccacggaagaccttacgtgccttgggatggtatcggtaccgctcctggattcggcggtggttattgcactcacacttccaacctgttcctgccatggcacagaccttacctggcccttattgagcaagagctttacaagcatgttcaacaagctgcgcagtccttccccgctggtgcgaccagagacaagtacgttgccgcagctcaaaactggcgtttcccatactgggactgggctgcgataccctgctctacctgcgaggctttcccagttcttctgagcaaccaatgggctactgtcactacacccactggtgtgcagactatccccaaccctcttttccgttatgacttccaccctgtctcagtctctgatatggtctacaatccttttgcatcttgggatgtcagcaaaagataccctacctcatgggacgcctctgcaggcagtcaaaacaatctgctgaacggcatcttcgccaacagtcaagcaaactaccgtgatcgtctatacaatctctacaccaactacaacaacttcagccaatttggtgattcggcttggatcactgctagctctacgaacgccgacagtctcgagtcaattcacgatgctattcactcaagcgtcggtaacaatggacatatgacctaccttgactacgccgcatttgaccccgtgttctggttgcaccatgtaatggtcgatcgcagtttcgcattgtggcaatcgctccacaccaacagctatgttgagcctctcgcagcagtcgggagcacattcacctaccccgctggaactgtcaatgatgttaattcagcccttactcctttcttcaaggatacggccggcaccaactggacctcgagcagtgttcgtgacatgactacttttggttacacttatcccgagcttcagaacggtgcttccgcttcaagcgttcgtgcagcaatcaacatgctatacggaaagaatgctgtttctgccgatgccatcgcaaatgacaatgtcggtaactcaggcagctctagcagttcggcagcacccgcagcttcttcagctccttctacttctaaggcacctgcagcttcttcagctgtatccacccctaaagcacctgcagctccttcagctcctgccgctgctccttcgactcccaaagcaccttcatcgccagtcagaggatctaccagacagccctggcagcctttcaccatctggaagagcagccctatccacatctggagcccttggtggaagcgtgacaacatgaccagcggaccgtatctcaacaccactatcggcacaaatggtactgacgactaccaccatgagtacatttgcaatattgtatcgcagaaatttgccatgaacggatcatacgctgtttacgtgttcttgggcaatgtctcaactaactccactgaggagctgcaactctcgcacaaccttgttggtacttactctgtcttctccaacatgccttcggacaacaaccacatggcaaacatggatctcaagatcaccggcactgttcctttgaccacctctcttctcggaaagctcgagagtggggagttgcaaagcatgcttcctgtccacgtcgagccataccttcgcaagaacctccaatggagagtagccaagtatgagggaggagaagtcaatgtcgcagatgtgcccgatctttcactcaatgtcgtacaagctccaattactcctgcagctagcgagaacgagttccctcagtggggtgctttcactgcccttaccagcgtgactgccggcaagcccggtggctacagtgctcagtactggaactgccctgaggatggctcatccttcgatagcagctactcacgtcccgctagcagccctacggcccccgtggcgtcagcaaacagtctcgccggtccttatggcaatggcacttccgcatcacctgccactcctcagggaactggctcggtcaacccaatgtcacctacaacctacacgggcgctgcaggcattatgagcctgtctggttacgccattgctttggcagcggcagctcttctcatttaa

SEQ ID NO: 2466 - DNA, 1110 bp, Aureobasidium pullulans
atggttcaattctctggccttgctgtcgccgctcttcttagtggtgcagccatcgcagctcctactctccaagagcgtggcagctgtaccttctctggctcctccgctgcttccaatgctctcaagcagaagaagtcttgctccagcatcatcatcaaggatgccgttgttcccgctggtaccacccttgacctgaccgacctcgcttctggcaccaccgttactttcgagggcaccaccactttcggctacaaggagtggaagggccccctcgtctccgtctctggtgaccacattaccgtcgtcggtgcctccggatctgtcatcgatggtgatggtagcagatggtgggatggcaagggtactaacggcggcaagaccaagcccaagttcttctacgcccacaagatgaccaactccaagattcagaacatcaagatcaagaactcgcctgtccaggtcttctccatcaacaactccaagcagcttactctctctggagtcaccgtcgacaactctgccggtgatagtggcgaaaagggccacaacactgatgctttcgatatcggctcttcctccggtatcaccatcagtggtgccaacatccacaaccaggatgactgtgtcgccatcaactctggatctgacatcactgtttctggctctacctgcactggtggccacggtctttctatcagttccgttggtggtcgtgatgacaacaccgtttctgacgtcaagttcttgaacaacaaggtcaccaactcccagaatggtctccgtatcaagactgtttacggtgctactggcaaggtttctggtgttacctactctggtaacgttctctctggtatcaccaagtacggtgttgtcatcgaacaggactacgagaacggttctcctactggcaagcctaccagcggtgtcccaatcactggccttaccatgaccgacaacaccgttggtgtttctagctctggtaccgacacctacattctctgtgcctctggtgcttgctccaactggaagtggtccggtaacaagatctctggcggcaagaagtccagcaagtgctctggtatccccagcggctctggcgccagctgctaa

SEQ ID NO: 2467 - DNA, 804 bp, Aureobasidium pullulans
atgagattctccgctatcttcgttctggcttctgccaccgccgccatggccatgaactccactcctgctcttttcgctcgtcaatcaactggtgccacttgctcgaacggagagtctgcttgcggtcaaggctgctacgaccccactgcctaccagtgctgcggttcgggcggtcaggtttgccctattggcaactactgcgccagcgcaagccgctgctgccccaatggagccaactgcgacggtcagggtacctcaactgctgagggttcttctgccaccgccgtccagtccggatctaccattcttggaagctcagcagcatctgcagccgcatcctctgcttctcagtcctctgtttcgcagtcttctgcttcacagacttccgcggcgcaatcttcctctgcttcttcttccctttcctcaatttcttcttccgcatcatctgcatcttctgttgctgcatcttctgcttcatcgagtctgacatcaagcgccgcagctgcatcttctgccgcaagcagtgccagctccagcatgtcttcggctgcttcatctgcttcttcctcgggatctaaggccgcttcttccatgagcagctctgcttcctccgctgcatcttccgcttccaagtctgcctcctccgcatcgaagtctgcttcttctgctgcttcctcggcttccaagtctgcttcatctgctgcctcgtccgcttcggcatcggcaacctctactggcgctgctgtcgctggtcccgccaccaacttcggacttgctcttctcggtctcgctgcccttatctaa

SEQ ID NO: 2468 - DNA, 1083 bp, Aureobasidium pullulans
atgcatcttcccacaatcttcgcacctcttgccctgctcggcctcagtgctgctatcccggccgatcacagcacctcatcttccaggactcaaggactcgctcaggcctggacttccaagggtcgccaatacatcggtacagcactgactatccgtgatgaccccgccgaacaaggaatcatccagtcacgtacggatttcaactcaattacgccagaaaatgccatgaaatgggagtctactgagccatcacgcaacgacttcacttttgccggtgcagatgccgttgccgactttgccgacaaatacaacaaagagatgcgctgtcatactctagtttggcactcccagctacccgcctgggtaagtcaaggcaactttgacaacaagactctgatttccatcatggaaaaccatatcaagactgttgccggcagatacaagaacaagtgcactcactgggatgttgtcaatgaagcactcaatgaagatggcacctaccgcagctcagtcttctacaacaccattggagaagccttcatccctatcgctttccgtttcgctgagaagtatgctggaaagaagacaaagctgtactacaacgactataatctcgagtacggaagtgccaaggccctaggtgctcaacgcattctcaagcttgttcagagttatggtgcaaagatcgatggtgtgggtttgcaagcacacttgagctctgaagctacggcatcgactggtgggggtgtgactcctgacgtcaagactctgaccaatgttctcaagctgtacacagacgttggcgttgaggttgcttacacagagctggatgtcagattcacgactcccgccacagatgcaaagctcaaggctcaagcagaggcatatgctagagttgttcaatcctgcatcaacgtcaagaaatgtgtcggtatcactatctggggtgtttcggacaaatactcatggatccctggagttttccccactgagggtgctgcgttgctctgggatgagaacttcaacaagaaacctgcttacagctccgtactcaagaccatccagtcgttccacaagtcttga

SEQ ID NO: 2469 - DNA, 738 bp, Aureobasidium pullulans
atgaagttcctcactgctgctgctgttatgctgggtgttgcctcggccgtccctactgccaccattgagaagcgcgctcaacagtgcggccagtgggacagcaaggtcaccggtgcctacactctgtaccaggacctctggggcatctccggctacactggttcccaatgctccgatatcactagcctgagcggtaacactctcaactggtggaccacttggtcatgggccggcggctccagccaagtaaagtcctacgccaacgtcgtcacaaagaccaacgccgtccaaatttccaagatcaagtccttggctacaaagtggacctgggttcaaaccggcagcaacgtcgtcgccgacgtcgcctacgacatcttcacctcctccaccgcgggcggcaaaaacgaatacgaaatcatggtatggctcgccgctctaggcggtgccggtcccatctctgccactgggtctcccatcgccaccgtcaccattgcaggccactcttggaagttgtggtacggcagcaatggcgtcaacgaggtttacagctttactcccaatggagcaaacgtcagcagtttcagtggcgatttgatggacttctttagctatttgatcaagagtcagggattcaaggatagccagtatttggtttctattggtgctggaactgagccttttactggatctaacgccaagcttacctcgtcgtacagcttggtgcctgcttacaagtaa

SEQ ID NO: 2470 - DNA, 1044 bp, Aureobasidium pullulans
atgtcctctatcaagtctatcgccctgctggctctggccaccggtttcgccagcgtagccaacgctgctcagactggtaaaaccacccgctactgggactgctgcaagggttcttgcgcatggcccggtaaggccgatgtctctgctcccatcactacttgcgacaagaacgacaaccctataactgatgccaacaccgcttctgcctgtgatggtggctctgcatacatgtgctctgaccagtctccttgggctgtctctgatgaccgggcttacggtttcgctgccgcaaacattgctggtggctcagaggagagctggtgctgctcttgctacaagctcactttcaccaccacatccattgctggcaagaccatgattgttcaggccactaacactggcggtgacctcggcagcaaccaattcgacctcgccatccctggtggtggtgtcggtatcttcaacgcctgcaccgacgagtggaatgctccttcctctggctggggcgctcagtacggcggtatcagcaccaacacatgcagcactttccccaaggccctccagcccggatgtggcttccgcttcgattggttcgagaatgccgacaaccccgagatggagtttgagcgtgttgagtgtcctgctgccatcactgcaaagagtggatgcaagagagccgatgatggttctcaagcctacccatctatcgcctcggctgcagctgcttcgtcgtcatcgcctgcagctgcttcttcctcttctgctgcccagaaggtcgctgctgcatcctcctcgagcgaggctgctcctgctgtttcgtccgcttctgttgcttctgccgttgagtcttctgctgctgcctactcctcagctgctcctgtcgaatcgtccgctgcagcatacacatccgccaccgccgctgtcgagtccccctcttcctctgctacctccattgaggccaccagcgctgctgcaccctcagcttcttccagctccgacgatgcaaactgcaacgttcaatacgtctacgagtacgacctttaa

SEQ ID NO: 2471 - DNA, 1059 bp, Aureobasidium pullulans
atgttgcgatcgacgctccttgctgttgcggcagccttgtccaatgtcgcttatggcgcactcacgtacaagggagctgatatcagctctcttatcatgctagagaatcaaggaaagaccttcaagacgagtgccggagtcacccaacctcttgagtctatcctcaagcagtctggagcaaactctgtccgccaaagagtctgggtcaaccctgccgacggcaactacaacctcgactataatgtcaagttgtccaagcgtgtcgtcaaccaaggcatgagtgtttatctcgatttccactactcggacacctgggcggatccgtcacaccaaacaactcctgccaagtgggatgacagcactatcggtcagctcaaatggacagtatacaactacacgttggcagtatgcaaccgctacgcagctgaaggcattagcccagccattgtatcgatcggcaacgagatccgcgctggtcttttgtggccgttgggaggcacaagctcttactacaacattgctgacctgcttcactctgcttcttctgccatcaaggactccaagctctccaagaagcctcagatcatgatccatctcgacaacggctgggactctggtacccaactctggtggtacaagaacattcttggccaagggcctctcaagtcgaccgacttcgacatgatgggtgttagctactaccccttctacaacgagaaggcatatcttggaagcttgaagtactcactccagcaactcgcagcgacgtacggtaagcagctggttgttgcagagactaattggcccgcaaagtgcagcaagccggcgtacaagttcccctcggatgctacctacatccccttctcgtcggctggacaggaggaatggatcgaggctgttggacaggtcgttgctggtgtcaagggtggtgctggtctttactattgggagccagctttcttgggcaatgcagggctgggatcgagctgcgaggacaacctgctggtcgatggtaatggtaaagcgaccgtgggcatgtctgctttcaagaacatctag

SEQ ID NO: 2472 - DNA, 873 bp, Aureobasidium pullulans
atgcatcttccttctcttcttctagctgcaggctcggcaagcgttgttcttgctcagcctcttactcaacttggacaacgtgcggccagcaagctccggtttgtcggcgtcaatgaggccggacctgaattcggcgaaggacacatacctggccgcttgggaacggactatacttggcccgatcttggatccatcagtacatttgtcaacaagggctataatagcttccgtgtgaactttttgatggagcgtctggtgcccaatcagatgactggccctctggatgctgcatacctgaacaacctaacacagactgttgacggcattaccaagcttggtgcctatgccatcattgttcctcacaattacggtcgttacaatggagcagtcttcacttcaaccgcggattttgcgactttctggaagactgttgctagagagttcaaggataatgagaagggcatctttgataccaacaatgagttccatgacgaatcttcgactcttgtagccgagctaaatcaagcagctattaacgccattcgctctgtcggcgctacctctcagtatatcaccgtggagggcaacgcctggactggtgcttggacttggacaactacacggggtaccgacggcaagaccaacagcgaaacgatgggtgcattgaccgatagcgtggacaacaaactcatctaccagatgcaccaatacctcgactcagtatgttttccatgtcctaacactgtccgcaagctaacaacaccaatcaggacggctccggtacatcctcgacctgtgtctcccagaccattggcagcgagcgtctcaaggcagcaacaatctggctccgtaataataagaagatcggattga

SEQ ID NO: 2473 - DNA, 636 bp, Aureobasidium pullulans
atgaagttcaccactgctgtcgccgcccttgctggcgttgccatggctgcccctgtcgccgagactgaggttgctgatttggagaagcgtgccactcccatcaactacgtccagaactacaacggcaacatggccaacttcaagtacaaccagggtgctggcacctactctgccagctggaacaaccctggtgatttcgtcgtcggccttggctggaacaagggtaccaccagacaaatcaccttcagcggtaactaccagaccagcggaagctcctactacgccgtctacggctggttgaacaaccccttgaccgagtactacgtcgttgagaactacagctacgacccttgctccaccggcactcaggtcggcaccttgaccagcgacggctcttcctacaagatctgtacccacacccaggtcaaccagccctccatcgccggcaccaagacctttggccagttcttctccgttcgccagaacaagcgtagctctggtaccgttaacatggccaaccacttcaacgcctggtcccagcacggcttcaaggctggcgactacaactaccaggtctttgccaccgaggccttcggtggcaccggcagtgcttccgtcactgtctctggttcgtaa

SEQ ID NO: 2474 - DNA, 2019 bp, Aureobasidium pullulans
atgcgcgttactcaggttatcgcaacccttgcgcccatcggtcttgtcgccgctggacctctccatggtcactctcgccatacccatcttcatcatcttcaccatcgctccctcataaacggcactctttcaaccaacactaccacggatactgccaactctacgatctacgctgatcatatttcatacgagacttctacagtcaatgttgttgctaactttgcagatggtactgatgccaactctgccagctcagagatagcttccagcaccatctcctccacaactgcgcagtcagatactgcttccccaactttgtcattcacttccgatgtttcgattgcgagcgggtctccttcgaactcatcgttggcttcagacgtctcgaccgccattccttccgatgcatctgtttccgttgttcttgctgttgcagctaccacacctactgctgtcggcgcactctctcagactgttgatactactaccagcatatctgttgataccgtctacaacaccatcactgtcaatggagctgtcactactgcatctgcaagcgagaagactgttactgtcactgatgtggtcaccaactatgtcaccgctaccttctcggcattgacacctttcaaggcccctgctatcaaggttgctgctctttcctctggatcctcttgtgccgctatcaagaccagcattgtctaccttcccgccagtcaatccccaactcttgttgctggaggtgcttctgccagcaaggtgacttcctcttcttccaaggctaccacagtcagcactacctcctccaagaaggttaccagcacctctactaagaaggctagcacttcctctgttaagcctacttcatcgtccaagaagtcttctaccatgattaccatgtcttctctggtccaacatggagtcactaccaagactattcttactacttctagcattcctgctgtgatttctagctccagtcagaaggcgtcctcatctgccaagtcatcaagcaaggccgcttccactttcgcaaaggctagctcgtcttcttgcgctactgttgcacctcctgcttccacacagaccggtatcgtgtctggatgcaccaagtggtacactgccaagtctggcgattactgctatgctattgcttctgcaaacggcatttctaccgatactttcatggcttggaaccctgctgtgaatgcaccttcttgcaacaacatccagatcggatatgcctactgtgtcgctgcaggctgtagttctagcgctgcttcttccgccgtagcatcctcagtcgtcgcaacatcgcccgccgcttctaccgtcaccagcgcaactaagacttcagcttcgggctcgtcttctgcttcgtccacctcggtcgcctccacctcatacaagatgtacaccggcaacggcaccgtcgctgcgggctggcctgcacaatcgcaatggatggactttgacgacatgttcaccgccaacatccccatcatgcaacaatcctgcgcaaacaacggctggggcgccaacgattcggccgacgagatcgcagacatcaagtcctccatcaccaaagttgctgcatcttccggagtggaccctcgttttatcctcgccatcatcatgcaagaatctaatggctgcgtccgcgtcatcaccacctcttggagtgtccaaaaccctggtctgatgcaagatcatgccggcagtggaacttgcaactcaggcggtgtgatccaagacccttgtcctgcttctgaaatcgaacaaatgattgtggatggtactgaaggcacttcctctggcgatggccttgtgcaatgtctcaaggaagctgctgtcacagatgtaagcatgtattaccgagctgctcgcatctacaacggtggtttgggaggttatcacgctgatgatctgggtactggatgttgcacactttgctatgcttctgatgtggctaacagactcacgggctggagctctggtgtcagtggatgtaccttgtag

SEQ ID NO: 2475 - DNA, 1605 bp, Aureobasidium pullulans
atgttcagctcaacctcttttgcgtttgcttattttgcgttctcttctctcgttgcggaagctttgcctgcacctgccctatctgcaccatcgttttccctcaaatcttattatcacggaccgccagcctggagcccctcggccacgtacgaatcgacttcgaccttcccgaccctctccattggatcacaacacattgtacctactggaattgtcccctctggatttctcgcctctggattttacccaactgcatctggatatgcttggcctactggaactggattcccttctggagtaactggataccctcaacctactggaactggacaaatcaacgccaccgccttctcttcatggtggacatcttaccgtcaagcctcctcctctactgcttcatacaacagcactgcctcggcctctgcttctagcactgcacctatctccaccggatctgcagctcttcctgacgttcttcgtggtgtcaacatcggtggttggctcatcctcgagtcatggatgaactgggatgtttttgccaacactactgccacagatcaatactcctttgacagctgcgagggcgctcaagacaagttggaacaacattggtcgacctacttcactgagtccgatgttgagggacttgccgccgctgggattaacgctgtgcgtattcctatcggcttctggtcctatgcccagtccgcaccctaccttatgggtgccgacgcctacctcgagaaggccattggctggtgccgtaaccacggcatcaaggttcttgttgactgtcacggctctcctggctcgcaaaacgggtttgacaactctggtcactcgggcaacgtagcctggcagcaagatgacaacatggagcagagcatcagcattcttgagactatcgccaagaagtacggtgctcaagagtacgccgacgtcgtctttggcattcagcttgttaatgaacccatctcgtgggaccagaacaacatcgacacaaccaaggaatgggcaaagaaggcttacacagctgtcaagtccgcatcgaccaaccaagacctcgctgtcatcatgcacgacggcttcatgggaccttctgattgggaagaggtcggctctgctgtcaacggcgatgcttctctttctgatgccaagttctggattgacgttcatctctaccagaaccaagttgcagctgactcattgctcactcaagatcaacacatcgaaaaagcttgcaattggtcatcgtccgaattgttgccttcatcatccacactgcctgtgattgtcggcgagttcagcgctgctaccaacatctgcgccaaccctgatggatccaccgttgctggtaacgtgtgctacatcgatggctgccaatgctctgccaatgtcgacatcgagaactggaaccagcctctcattcaggcgactcgcaagttcctcgaagccgagctcgacacattcgaggcacacgctcgcggctacttcatgtggaacttcaagggccccggtgcttggggctaccaaaacgccatcaagtatggcttgattggagacaagatcacagacagaaagtaccccggtcagtgcagctcataa

SEQ ID NO: 2476 - DNA, 690 bp, Aureobasidium pullulans
atgcacttcaccaacagtgttgtcatcggagcctctctcatcggcctggctgctgccagccctgttgaccttgagggtcgcgcctcagcttgttcgagctacactctcatcgatacccgcggtaccggcgaggcccagggcccttcctccggcttcctcaccatgaaccgcaacatccaatcccaagtctctggcggcaaagtctacaacactgtgtaccccgccgactacagccagaactcggcagcaggcaccgccgacatcgtcaaccacatcaaaacgacactgcagaccagtcctaacgaatgcttcatcctcgagggttactcccaaggcgctgctgccaccgtcaacgctttgtcgcaactgactggcacttcaaacactgccgtcaagggtgtattcctcatcggcgaccccctgcacaagagcggcttgacttgcaacgtcgacagcactggtggcaccacaaccagaaacgtcaatgggcttgagtacaacgcttactccaactacatcccttcgagctggatttcccgcactttggatgtctgtgcttatggcgatggtgtctgcgataccacacacggctatggcatcgatgctcaacacctttcctaccccaatgatgccaacgtgcagaacatgggtaccacctttgttgttggcaagctgaagggtacttcctaa

SEQ ID NO: 2477 - DNA, 921 bp, Aureobasidium pullulans
atgcatttctcttcgttcattgctcctgtctttgccctgttgggtgcggtgtctggtaactcgctcgctggtcgtgcggcccagctcacccaggtcaacaactttggcgacaacccttcgggcactggcatgtacatttacgtacctaccaagcttgctgctaagcctccgattatcgttgccattcactactgcactggtactgcccaggcttactaccagggctcgccctatgccaagcttgctgatgagaagggcttcattgttatctacccttcctcccctcacgctggtacttgctgggatgtctcgtcgcagaagtctttgaagcacggtggtggtggtgacagcaacgccattgccaacatggtcacctacgccctcaagaaatacaatgccgaccccaagagagtcttcgttactggttcgagctctggtgccatgatgaccaatgtgatggccgctacctatcctgaactgtttgctgccgccactgcttactctggagtgcccgccggatgtttcgtatcctcctcaggtgccgtggacgcctggaactcgacctgtgcccaaggaaacgtcgaccagtctgccgcttactggaccaacgtcgtcaagaacatgtaccctggctacagcggtgctcgtcctcgcttccagatctaccacggtagcatcgacaccactctccgccccaacaactacagagagtctgtcaaggagtggaccggtgtctttggcttcgatgccaacaagcctcagactgtcaagaacaacttccctgccaatggatacaccactgatatctggggtgttgattctgctaaccctctcggcaaggttcagggtatctacgctctcaacgttggacacactgttcccatcaatggtgctcaagacatggcttggttcggtctttaa

SEQ ID NO: 2478 - DNA, 981 bp, Aureobasidium pullulans
atgcgttccttcgctactatcatggctgccgccgccctggcccagaccgcaatggcccactaccgcttcacttcgctgattgttggtgacgaggtcaccaaggagtacgagtatgttcgccagaacagcaacatgaactctcccgtcaccgatgtcacctccaaggacctcatttgcaacgttggtggcctcgataccggtgcccagacaaagacctacaaagttgctcctggtgacaacgttggtttcgctctcgacacccccatccagcaccctggtcctctcaacgtctacatgtccaaggctgatggcgatgtttccaaatatgacggatccggtacctggttcaagatcttcaccatgggtgccaacaaacccggcgacaacggtcttaccttcaaggccgaccacctcagcaaggttaccttcgaccttcccaaggacactcctcctggacaatacctcctccgtgttgagcacatcggtcttcacagtgcctcttctttcggcggtgcccagttctacatctcttgcgcccagatcgaggtttctggcagctctaccgccaagccttcccctactgtcaagattcctggcgtctacactggtcacgaggacagccttgagttgagcatttactaccccatccccgagaactaccagccccccggccctgccgtttggggcagcgatggctcatctgattccgcacctgcctcttctgctgctgctcctgcttccagctcaagcgcttctgctaaggtccccgccaccaccgcctcatctgccgaccctactaccatggccactgtcgtcaagtctagcaccgctgcttctactgcaactggctctgttggcggctctaccagcggcacttccaagaagtaccagcagtgcggtggtaagggttacactggtcctactgagtgcgaggccagtacttgcaagttccaaaacgactactactctcagtgcctctaa

SEQ ID NO: 2479 - DNA, 873 bp, Aureobasidium pullulans
atgccttccctttcttcttacatccttgcttcggcaggggcctctttggtcaatgcacaatttggcaactttggttcgccataccccaacacaacataccctggattcgaatcagaaaacccttataccattgagggttcgcagagcttccagtggagccctcctaagtaccccagtccctggggtgaaggttctggtgactggaaggagtcctatgcaaaggctcgcgctcttgtttcacagttgacccttgaggagaaggtcaaccttacaagtggtgttggaaccaaccagggcaactgcgttggtcagactggttctgttcctcgccatgggatcaatggtctatgcttgcaggactcgccggtaggcgttcgactcacggatggcaacagtgtcttccctgctggcgttaacgttgctgccacttgggaccgcggccttgcctatgctcgtggacgtggtatgggtcaagaacattacggcaagggcgttgacatgcagctcggccctgtcgctggtcctcttggtcgcgcacctgctggtggcagaaactgggagggattttctcccgatccttatcttaccggtctcatgttcgccgagtcgatcaagggtattcaaagtgccggtgtcatgaccagtgctaagcacttcattgcttacgagcaggagcacttccgtcaatcccaggaggccaagaactggggcttcaatgttactgagagtatcactgccaacttggacgatgtcaccctgcacgagctgtacctctggcccttcgccgacggcatcaaaacaagtgccacctctatcatgtgctcttacaaccaggtaaacactcctcatcttgcccgaacagctacattttaa

SEQ ID NO: 2480 - DNA, 666 bp, Aureobasidium pullulans
atgaagttcttcgccaccattgctgctctcgttgtggcagctgttgctgccccagtcgcagaggctgaggctgaggccagcagccccatgctgatcgaacgtgccggtcccggtggcatcaactacgtccagaactacaacggcaacctgggccagttcacctacaatgagaacgctggtacctactccatgtactggaacaacggtgtcaatggcgacttcgtcgttggtctcggttggtcaaccggtgctgcccgctccatcacctactcttccaactaccaggccagcggcggttcttacctgtccgtctacggctggatcaacagcccccaggctgagtactacattgtcgagtcttacggctcgtacaacccttgcggcgccggtcagtccggtgtcactcagctcggcaccgtctacagcgatggcgctacctacaccgtctgcaccgacactcgtaccaaccagccctccatcactggtacttctaccttcaagcagtactggtctgtccgccagactaagcgtacttccggcacggtcaccactggcaaccactttgcttactgggccaagtacggctttggcaactcttacaacttccaggtcatggctgtcgaggctttctctggcactggtagcgccagtgtcaccgtctcttaa

SEQ ID NO: 2481 - DNA, 1944 bp, Aureobasidium pullulans
atgcactcattcacaaacatgccactcattccctttttgtttactctcttttcgttcgtcaccttgagcatagctggctatgttcttcaagatgactacaactctgcatcgtttttcgacatgttcgacttcttcacagattcagatcccactcatggctttgtccagtatattgaccaaagctcagcatggaacactggtctgattagcaactcgaacgacaaggtctacatcggagtcgatcacaccaacacccagcccaatggtcgccctagtatccgcttgactagcaagaatgcctacaattccggcactctcgttattctcgatctggagcatatgcctggaaacgcttgtggtgcatggccagccttctggatggtcggacccagctggcccaatggcggtgaaatcgatatcatcgagggtgtgaacacacagaatcacaatgccatgactttgcacacagcagatggttgtaccatctacgacaatggcaatttcaccggcagcctctactccgacgactgttatgtctatgcagcggaccagaccaacaaccttggctgtcaaattaccaccagcaactacaatacctacggcgatggtttcaacaacgtgggaggtggtgtctacgccatggaatggaccgatgaagcaattagcatttggttcttccagcgtggtagcatccctgccaacgtcctcagtgccaatccctctccggactccacttggggaaagccactttcgcaattcacaggctgctgtgacatccccgaatttttctcggaccaacagattgtttttgatgtgacattttgtggcgactgggctggaaacgtctggagcagtgactctacatgttctgctctgagcgggtcctgcaccgactacgtcgccaacaaccctcaggcattcgggaatgcttattggtccatcaactctcttcaagtcttcgagcagactgcaaaatcttctggaaaggttgcactgcccgatttctgctctaataataacccaacacaaactgagacattcgttagtagtgctagcaccatatcatcgacggagacggtgcctgctgagactacctcgaccgtgtcatctactgtcgctccaacgactacagagacatcgtcaacgcaaacctcttcgtccgaatcctcgtcctcgaccgccgaaacctcgtccactgtcgaatccgcatcgacgacttcaagctcatcaagtggtagcccttcgtccacctcaagcaacaaggcctcttcggctgctcaagcttcgtcgactgccgcaaagacgtcgaatgttgacacatcacccgcgcctgcatcgactgcagagacggctgctgcaacaacaagctcctcgcaagcattgccttcgatgaccgatgttttgacgactctagtcctggctgtggctgcagatgcaacctctacagaatggactacggtgacgacaacgctccgccaagtggtatcggtaccgccgctctcagagttgagcccaactgagcagccatcacccactgagaatgtcgagaccacccctgccgcaaatgtcgagacaacgcccacagcacaatcattcgctgagaccagtgttctcacgaccatcgtgcaggcagtatcggccgatgcaacgacgactgtgtggacgaccatcaccacgagcattgagcgggccatcacagcccctgtggataccacaatcacacaatggacgactcagcaagtaacacaggcgcccgacgtctacacgacgttgtggacgaccatcacaagtaccgtcaacttccaaaaggcgagacgcaccgctctacccgaaagcttgatgctgggaggcgagtcggcggcggcaacacaatcgacacggattgaagcacccagtcctagcaggcgctggctcccaagacactggggccgagcacgcaactaa

SEQ ID NO: 2482 - DNA, 1926 bp, Aureobasidium pullulans
atgccactcattccctttttgtttactctcttttcgttcgtcaccttgagcatagctggctatgttcttcaagatgactacaactctgcatcgtttttcgacatgttcgacttcttcacagattcagatcccactcatggctttgtccagtatattgaccaaagctcagcatggaacactggtctgattagcaactcgaacgacaaggtctacatcggagtcgatcacaccaacacccagcccaatggtcgccctagtatccgcttgactagcaagaatgcctacaattccggcactctcgttattctcgatctggagcatatgcctggaaacgcttgtggtgcatggccagccttctggatggtcggacccagctggcccaatggcggtgaaatcgatatcatcgagggtgtgaacacacagaatcacaatgccatgactttgcacacagcagatggttgtaccatctacgacaatggcaatttcaccggcagcctctactccgacgactgttatgtctatgcagcggaccagaccaacaaccttggctgtcaaattaccaccagcaactacaatacctacggcgatggtttcaacaacgtgggaggtggtgtctacgccatggaatggaccgatgaagcaattagcatttggttcttccagcgtggtagcatccctgccaacgtcctcagtgccaatccctctccggactccacttggggaaagccactttcgcaattcacaggctgctgtgacatccccgaatttttctcggaccaacagattgtttttgatgtgacattttgtggcgactgggctggaaacgtctggagcagtgactctacatgttctgctctgagcgggtcctgcaccgactacgtcgccaacaaccctcaggcattcgggaatgcttattggtccatcaactctcttcaagtcttcgagcagactgcaaaatcttctggaaaggttgcactgcccgatttctgctctaataataacccaacacaaactgagacattcgttagtagtgctagcaccatatcatcgacggagacggtgcctgctgagactacctcgaccgtgtcatctactgtcgctccaacgactacagagacatcgtcaacgcaaacctcttcgtccgaatcctcgtcctcgaccgccgaaacctcgtccactgtcgaatccgcatcgacgacttcaagctcatcaagtggtagcccttcgtccacctcaagcaacaaggcctcttcggctgctcaagcttcgtcgactgccgcaaagacgtcgaatgttgacacatcacccgcgcctgcatcgactgcagagacggctgctgcaacaacaagctcctcgcaagcattgccttcgatgaccgatgttttgacgactctagtcctggctgtggctgcagatgcaacctctacagaatggactacggtgacgacaacgctccgccaagtggtatcggtaccgccgctctcagagttgagcccaactgagcagccatcacccactgagaatgtcgagaccacccctgccgcaaatgtcgagacaacgcccacagcacaatcattcgctgagaccagtgttctcacgaccatcgtgcaggcagtatcggccgatgcaacgacgactgtgtggacgaccatcaccacgagcattgagcgggccatcacagcccctgtggataccacaatcacacaatggacgactcagcaagtaacacaggcgcccgacgtctacacgacgttgtggacgaccatcacaagtaccgtcaacttccaaaaggcgagacgcaccgctctacccgaaagcttgatgctgggaggcgagtcggcggcggcaacacaatcgacacggattgaagcacccagtcctagcaggcgctggctcccaagacactggggccgagcacgcaactaa

SEQ ID NO: 2483 - DNA, 1125 bp, Aureobasidium pullulans
atgtttttcccctctacgcttccctcattggggctcctgacctcttttgtctctgctcaatactacaataccaccaacggcacttctgcttccaattcaactacatacacaaaccctatcctcaacgaagtgggagcggatccgtgggtgattcgtcatggagactattactacatgacctacacaacgaacaccaacattaccatgctccgcagttctgtcttgactgactgggacaatgccgatgtcaaactggccttcgacccacctccaggcatgaactactcgaccgacttgtgggcacccgagttgcatcaaatcgacaactcctggtacatcatttttactgcagaccccaattatgatacgccgtcgcccgaggtagatatgtggtgtgattataattgcccggcagttcaccatcgcatgtatgtccttgaaggctcgtcttctgacccctgggagtcaacctacaccttgaagtctcagctgaacacatacgatcaattcgctattgatggtacctatttccaacatgactcagggctgtatcacatctacagttgttggtaccgtcaatacgacgcctggccatcgaatctctgtatcaccaagatgtcgaatccttggactgtagagagcaacttcacagaacgccaaatcatcagcgtcccagataatccttgggagaagacaccttatggacgaccttggaattaccgtctctcatcgaacgaaggaccacaacaactcaccaatcctactacaggccaacagttcgtcatatacagcgctgctcggtctgacaaccgcaactactgtctaggtcaattagagcttgttggtgatgatccgatgaatccctcggactggcgcaaggacaatgaaggttgtgttttctaccaaaaccccaaggaagaagcatatggagttggacatgccagtttcaccaagagtcccgatggtagccaggactggatcgtttaccatggtatgagagatcccacgaatgggtggagtgcgagaaccattagaacgcagcaattcacgtggaatgctgatggcacgcccaagttcccaaaaccgggatatggaccttaccaagtgccctcgggacagacttga

SEQ ID NO: 2484 - DNA, 930 bp, Aureobasidium pullulans
atggcaaaggcacgatggatgggaatggacaagcgtggtacaacggcttcgctggccgcgaaattttggtcagccattgaaccgtggccaaccatgactccacaactgacttccgaccaggatgctagtaacacgtactatcgtcccatcctcttcttgaccgacaacgccaccaatgtagatatcgaaggcatcactttcctcaacagcccgtgctggacaaccttcttggtccgtactaaggacgtctcgttcgacaatgtatacattgaagctttcagcaacaacgcttctgccctccccaaaaacactgacggcttcgattcgctcaatgttgatggcctgactgtcacaaacactcgtgtcaacgtgggcgacgactgtttttcgcctaagccgaacaccacaaatatttacgttgagaatctttggtgcaatggcacgcacggcgtatctatgggctcgatcggccaatatcctggcgtcaaagactatatctccaacgcctacatgaagaacattaccttgctcaatggtcagaacggcgcgcgactgaaggcatgggccggaccagaagtaggatatggctacatcgataatatcacatacgagagcgtgcacatcgaaaatacagatgcaccaatcgtcctcgatcaatgttacttcaacatcaacgagacaacatgcgctgcttatccttccaaagtcaacattaccaatgtcaaattcatcaacttcacgggttccgcctctggcaaggataacagagtggttgcggatttgacttgcagtcctggcgctacttgcagtggtatcgagttgcagggaatcgatttgactagccctaatggtacggcagagattgtgtgtaacaatattcagggcgatattggagtgccttgtatctcagaggcagatgctgataactag

SEQ ID NO: 2485 - DNA, 678 bp, Aureobasidium pullulans
atgcacttctcttctctctttgtcgccgcttcggctttcgttaccgctctggcagcacctgtcgcgggtccctcagctattgagaacggtcttttctcgctggtcgagcgctccactcctgctggcactggccagaacaacggctactactactccttctggaacgctggaggcggcaccgtaaactacaacaacaaaggtgcgggcgagtacttcgtctcatggcaaatttgcaacaactttgtcgccggaaagggttgggccaccggcgcagcccgcaagatcaacttcaagggcacctactctcccaagggcaactcgtacctgtctgtctacggctggagcaccaaccccctggttgagtactacattctcgagtcgtatggcacttacaaccccggcagtgggttgcagcacatgggcactgtcacctctgacggctctgtctatgatatctacaagggtgttcgcaccaaccagccttccatccagggaacaaagactttcaaccagtactggagcattcgcaagaacaagcgctcttctggtactgtcactactgctaaccacttcaatgcttgggctaagctcgggatgaagcttggttcttacaactaccagattgtggctactgagggttaccagtcctctggttctgccgacatcaccgtttcctag

SEQ ID NO: 2486 - DNA, 2427 bp, Aureobasidium pullulans
atgcgtttcactaccgagatactggccgttgcgctggctctcgctgatgttacttcagcccagaactcgacatacaatgctactgctgctgctcaagctcagttgaaggctgagctggccaatcttgagaagttctggtcttatggaagatctccacctgtatacccaagtccccaaggagcaggcgaaggtgagtgggccgctgcctacgaaaaagccagagctctggtagcttctatgaccgatttcgagaagaacaacatcacatatggttacacgtcaacgacaaacggatgtggtggtaacagtggatcagcacctagagttggcttccctggtctctgtctcagcgatgctggaaacggcctccgtgctacagacggtgtcactggctttgcttcgggtgttcacgttggtgccacatggaatcgaaaccttgcttaccaacgagctcactacatgggtgctgagttcaaggccaaaggtgtgaacgtcctccttggacccgttgttgggcctctcggaagagtggccgaggggggtcgcaactgggaaggcttcagcaacgacccctatctcgctggaagtctgacgttcgagaccatcaacggaatgcagaacagcgtcatcgcttgcatcaagcatcttatcgggaatgaacaagagctcgaccgtaacccagctggtaataacgcttcgatgtctgccaatatcgacgacaagactttgcacgagttatacatgtggccgttccaggatgccgtacacgcaggcgtcggatctgccatgtgctcatatcagcgggtcaacaactcctacagttgccagaactccaaggtcatgaacggacttttcaaggacgagctctcctttcaaggtttcatcgtgagtgattggggagctcagcattctggagtggctagtgctgatgcaggtcttgatatggccatgcctagctcgacctactggcagaacggcaacctcagtcaagctgtcaacaacggctcactttcttctactagactcgatgacatggcaactcgtatcgtcgcctcttggtatcatctcgccgggtggcagaatcccggtcacggcatgcctatcaacctcaccctgcctcatgagtatgtcaatgctcgcgatcctgcctcaaaggtgagcacattccagactgctgttgaaggccacgttcttgtcaagaatgtgaacaacgctctgcccttgaagagccctaagttcctttctctctttggttacgatggtatcgctcccttgacctatactcccgacaatgcagccgcattcactctgtccaactttggctactctcctgtcaatggcatcaacgccactgagctctttgctctgtttgttagcccttctgtcgttcctacaaacatcttgcctggtatcgcaatcaacggaaccatggtcactggaggcggttctggtgctgctcagcctgcgtatatcagtgatcctttcagcgccatcaccgagcaagcaatggaggacgacacctggctacagtgggacttccacagccaaaaacccgttgttcagagggggtcagaagcatgccttgtcttcatcaacgcctttgcttctgagtcatttgaccgcccttacctgcaggatgagtactctgatgaccttgtcatgaatgttgcagctcaatgcaacaacaccatggtcgttctccacaatgctggtatccgcaccattgacgcctggtactccaaccccaacatcactgccattgtctacgcccatctccccggccaggacgcaggcaaggcgttggtcgaggtcctctacggcaagcaatcgcccagtggccgtatgccttacacggtcgccaagaagcctgtcgactatggcaaccttctctcgcaccttactcctgacaataccagcaactactacacccaggacaacttcaccgagggtgtctacatcgactacaaagccttcattgcccaaaacattactcctcgcttcgagttcggttatggtctgacatacacaaccttcaattactcgtcgctgcagaccaaggtgctcagcaatgtcagcacctccgagttccctcccaactctaccattgctcaaggtggtgtcgcctctctttgggatgttattgccacagtcgactgcaccatcaccaacactggctcggtcactgcctctgaagtcgcacaattgtacgtccacatccctggcggtccagccaaggtcctccgtggattcaacaagcaaggcattcaaccaggcaagagcgtcaagttccacttcgacatcactagacgtgatctgagcgagtgggatgtcgtcagccagaaatggcgtctgcaacaaggcgactaccccatctatgtcggcaagagtgttttggacattcagctgaccggtagcttgcacatctaa

SEQ ID NO: 2487 - DNA, 1056 bp, Aureobasidium pullulans
atgtacttcaattctatcgctctcaccaccgccttgctggcaggatccagcatggccgagatcatctgggatggtcgcttcaccgagaagtctgctgccgaaattggcaagtggtcatgggagaaccaggttggtgcctaccagtactacattcatggatctggcgcaaccaccgactacgtcaacattagccctgactacgtcaaccctgctgatacctcatcctcggatggtgtccgcattactgtcgatggtacttcctcgtggaatggtcagaccatgatgcgtaccgagctcattccttccactaaggcagccatcaacaagggcaagagatactaccacttcagtctcaagcgttgcactgagaatgctcccgacgtcacagctgagcaccaagtcgccttcttcgagtcccacttcaccgagctcaagtacggtgttgatggcagcaatggaaaattgcaatggatgaccgatggcaagtctcagttcgacatggacttcgaagccgatgtttggcacaacgtcgcctatggtattgacttcgacgcgagcacggttgagttctaccactccactggcgctgataagctggtgtccaaggctggtcctatgaaggcttctgttagctccgacggtgctgattggcacgttggtgtgctcaagttctcaaagaccaaggaggattggttcttcagcagtgtttacattgaggacggcgagttgaccacttcaatttctgctcccggtggtgaggcccctgctaaggtgtcctctgctcctgctgcctcttcgaccactgccgtctcttccaaagctcctgttgtcgcatcttcatcttctgctgctgctgcccagatcacctcatccaaggctacatcatcctctgctactgccgtcgagagctcagctacagccgttcccactactctgcagaccatggctaagcccacctcgagcgttgcatcggtcgtgtcttcgaccgcaactaccgagaacgcgcccactgcaactgatgacgctggctgcactgtcgagtatgtttacgtctaa

SEQ ID NO: 2488 - DNA, 1110 bp, Aureobasidium pullulans
atggttcaattctctggccttgctgtcgccgctcttcttagtggtgcagccatcgcagctcctactctccaagagcgtggcagctgtaccttctctggctcctccgctgcttccaatgctctcaagcagaagaagtcttgctccagcatcatcatcaaggatgccgttgttcccgctggtaccacccttgacctgaccgacctcgcttctggcaccaccgttactttcgagggcaccaccactttcggctacaaggagtggaagggccccctcgtctccgtctctggtgaccacattaccgtcgtcggtgcctccggatctgtcatcgatggtgatggtagcagatggtgggatggcaagggtactaacggcggcaagaccaagcccaagttcttctacgcccacaagatgaccaactccaagattcagaacatcaagatcaagaactcgcctgtccaggtcttctccatcaacaactccaagcagcttactctctctggagtcaccgtcgacaactctgccggtgatagtggcgaaaagggccacaacactgatgctttcgatatcggctcttcctccggtatcaccatcagtggtgccaacatccacaaccaggatgactgtgtcgccatcaactctggatctgacatcactgtttctggctctacctgcactggtggccacggtctttctatcggttccgttggtggtcgtgatgacaacaccgtttctgacgtcaagttcttgaacaacaaggtcaccaactcccagaatggtctccgtatcaagactgtttacggtgctactggcaaggtttctggtgttacctactctggtaacgttctctctggtatcaccaagtacggtgttgtcatcgaacaggactacgagaacggttctcctactggcaagcctaccagcggtgtcccaatcactggccttaccatgaccgacaacaccgttggtgtttctagctctggtaccgacacctacattctctgtgcctctggtgcttgctccaactggaagtggtccggtaacaagatctctggcggcaagaagtccagcaagtgctctggtatccccagcggctctggcgccagctgctaa

SEQ ID NO: 2489 - DNA, 1281 bp, Aureobasidium pullulans
atgtctatccgttcgctactcagcttcggcttgctggccgctcctttggtctctgcactgcctgctgcagaccacaagtcaacctcgtgcagaaccagcaccagtacttcccactcgacttcgcactcttcctcccactcctcgactcagacttcgacacacagccctgcaacttctgctgtcgtcaccaccactaccagctctgcttccaacactgttatgaccacaactttgttggcaacagctactggcaagacgggcttgaatgactacgcaaagaaggccggcaagctgtatttcggtacagctgcagatgttcctggtaccaacgagaccaccgacaaatactaccgcgcagaacttgccaacagggatgactggggccaagttacacctgccaatgccatgaaatgggtcttcacagagcccgagcagaacgttttcaactacaccgaggcggacatcttccttagggatgctgctcctcctggaagactggtcagatgccacaacttgaactggtacaaccagctccccgagtggctcacttctggcacatggacaaacgagaccttgaccaaggtcctccagaaccacgtcactaacctcgtcgagcactttggcgaccgttgctacgcttgggatgtcgtcaacgaggccttgagcgacagtggcaccggtaacttggccgacaactccacctggagatcggatatctggtacaacaccatcggtcctggttatgttgctattgctttcaaggccgctgaagctgctgttaaggccaagggcctcaatgtcaagctctactacaacgactacaacattgagagtgccggtgccaagtccactgccgcacaggcacttgtcaagagtctcaaggatgcaggaatccagattgacggtgttggactccagtctcacttcattgtcggagaaactcccagcaaggccgctcagatggccaacatgcaggcatttgccgcacttgatgttgacgtagccatcaccgagcttgatatccgtaccactacgcccgccactgctgcagctcagcgacagcaggtccttgactacgccagctctgttggtgcctgcgcagacgtagacgcttgtgtcggcattactgcttgggactttgacgacacttacagctggatcccctcgactttccctggtcaaggctatggtgatcttttcttccagcccggaggatacaacactccgcttgtccgcaaggcagcctacgatggttgtattcagggtcttaccagctcataa

SEQ ID NO: 2490 - DNA, 1245 bp, Aureobasidium pullulans
atgcacttcgccagaaactctgccctagctgggctggctgtcattcctcttgcctttgcccagacctacacctcttgcaaccctatggacaagacatgccccaacgatactggacttgactcggctagcttttcctgcgacttcaccaagggcaagtcggctcttgctagttggagtgctgctaccgggacttcgctcacctacgatggaaccaagggtgctcaattcgtcatcagcggcaagaaccaggcacctaccatctcatctgacttctacatcttcttcggacgtgttgacgttaccatgcaagcagctcctggtgttggtatcgtaagcagtatggtcctcgagtccgatgatctggacgagattgattgggaatggctcggtggtgatagtacccaggcccagaccaactacttcggcaagggcaacaccacctcgtatgatcgtggtacctaccagaccgtctcatcacctcagacaatcatgcacacttacagcttcgactggactgaggaaaggattgagtggctcattgatggtgtggtcgttcgcactctcatgtacgccgacgctgtgggtggtcagaacttccctcaaacacccatgcgcctgaagttgggcaactggatcgctggcgacccagccaccaacgccgccggcactatcgagtgggctggaggtgataccgacttctctaaggctcccttcaccatgtacgtgaagactgttagcattaccaactacaacccagccaaggagtacgagtacaccgacaagactggcagctatgaaagcattaagctggttgacagctcttctggatcatcctcttcttcagcctctggcagcagcggctcggcttccagcagcgcaactcaactcaagcccactgccgtcatttcaaacagcttgaacactgtcgcgcctacctcttccatcagtgttaagaaggctcaggctcaggacagcgctgccgttgttgcaagctccaactcttcttcgactgcttccactatgaagtcagtcatcagcagtgtcagcgccagcgcgacctcggctgccgcatccgcatccgcatccgcatccgcatccgcatccaagagttcatcccacagctcttctgcttcagctacctcgagccagcctgcacagcagagtaccaacgctggtgtttccaacactgttgctactggccttttctcggttgttggcgccgcattggccctcttgaccctctaa

SEQ ID NO: 2491 - DNA, 888 bp, Aureobasidium pullulans
atgcatttcaccgctattgccctcactgcccttgcaggattcgccccgctcattgaggcccactacaccttcactcagctgatggtaaatggtgctccagttggcagagattggcagtacattcgtcagcacaccaggggctacatgccaaccaagtacggagagatccttgagaatgacttccgctgcaacaagggtgccggatctggtgccaacaccgaggtttataccgtcaagcccggtgacaagatcggcatgaagcagggctttggtgcgaatggaattgagcaccctggcccggctcaagtctacctgagcaaggctcctggctcagtcaagagttacgatggcagtggtccttggttcaaggttcagcaggacatcctttgcaagtccggcaaccctcaggccctcaagaccgacgcatggtgcatttggaagaagaacaacattgaattcactgtccctgacaacattcccgacggcgaatacctcgtccgcagcgaacacatcgccgtccacggtgcccacgatggtcaagctgaattctactactcctgtgctcaaatcaaggttgagggaggtaaaggaaactctgtccctgagggtgtcaaaatccccggcgtctaccaggttaaggacaaggctatcaacttcagcgtctggggctctgccactacttaccctgatctgcccggccctgctgttgtccctggcggtcgcaccactggctctatcgatggcaagacttccggcactactgttgttactggtggtcagacctttggctctaccaatggccagacttctgactttactgctgctaagtctgctttccagggtggttctcctgcttgcagagccgctgctgaggtcaatgcttactaa

SEQ ID NO: 2492 - DNA, 1542 bp, Aureobasidium pullulans
atgaggttctcatctgttcttgcggccttgtctgccatcggcagcacgctggcacagcagacctacaccaatcctgtactgtggtacgatcttgcagacctcgatgtcttccgtaaaggcaatgaatactactattcggcttcaaccatgtctttctcccctggagcgccggtcctcagatctggagaccttgtcaactgggagtttatcggacactcggtccctagattggacttccacgacacagcatatgacttggccaatggcaaacaagcctacgttcgtggtatttgggcttcttctatgcagtaccgcgagtacgacgatactttctactggattggctgtgtcgacttcaagactacttacatctacaaggccaaggaccctgctggtgattggagtaaggttggcgagattgggacttgctactatgattgtggcatgttgttcgatggtcagaacatctacgttgcttacggcaacaccaagatcagcgttgcacagctgaacaatgactttactcaaaagtccactacgcaggtctacagctccagcttctacatcgagggctctcacatgaagaagattaacaacaagtactacatctttgtcacccagcccgcctctaatgagtacgtccttaagtcggactctggtccattgggtccatacgagatcaagatcttcacaaaggcaccggcgagtggtatccagggcagtggaaatcctcaccaaggaagcgtagtcgacactcccaacggcgactggtactatctcagtttcattgatgcctatcccggcggccgcagtcctgccttggcaccattcgtgttcgatgcccaaggctggccatccctaaaacaagcaaacggcttcgccatcgcaaactcataccccgtaactcccgtgcctgtcaaatccacaaccggcaccgataccttcacaggaccaaaactaggtcctcaatgggaatggaaccacaaccctgacacttcctccttctcctttgcttctggaggcggtttggtcctcaaaacatcctcagtaaccaaagacctctaccacgccaaaaacactttgacccacagaatcttaggtccagacagcaccgccacaatctccctcgacatttccaaaatgtctgctggcgatcaagcaggtctggctctgttccgcgataactcagcttacatcgccatccgcaacaatgctgtaatccttcaacgtgacttgactctaggagcagattggaacactctttccagcggaagaaccgagacctctgcgtctttacctcaaggaacgaaaaatgtttggttgcgcttgcatgctgatatcaaacctgctggttcccatcaaggcactttttcgtggagtacggatggaaagacgtttaagcagttgggaacgccgtatacgatgaacacgacttattactttttcatcgggtataggtttggtattttcaacttcgcagagaacaatctgggaggtagtgtcaccgtcaagtcttttgatctggctctgggatcaaagtag

SEQ ID NO: 2493 - DNA, 1740 bp, Aureobasidium pullulans
atgcgtctggaagtgttgaccatatcagccgtggctgtcttcggcctaggcacatcagtcgcagctcatccaggacctgatgctaagaaacagagttcgagcacctcgacttcttctgttgcaagcgacacagcattcagctacactcaagtcaccagtgatcgatacgcgaccccgatcgcatcgcccgtcaagtaccaaagcgcgttcgcaccaccgtattcgaaggcgaagagtctgctgccatcgggcatcacgtacacgacctattctctgaacccctcggccacctcagatggaagatatggacaaagcgcgtatgccgctctttgggctgggtacagctacctgcataccgtacctttcacaaccactgctctaccgacactcgtcgcaaccagcgagctcgtcttccctcccgccctccctttcgaaacgagctctgcctcgatgaagtttgacaaagactttgtctggggagtcgctggcagtgcatggcagatcgaaggcgcattgcagcaagaaggtcgtggccccggcggtttagacatcttcggcaaccagaaaataccagctttggccggtcaaaacgactctgccgtgacagacatgaactactacctgtacaagcaggacatcgctcgcttggctgctatgggtgtgccctactactctttctccatctcctggagtcgcatcgtaccctttggcaatgccaacactcctatcaaccaacaaggcttggatcactacgacgatgttatcaacacgtgtttgcagtacggcatcaagccgattgtgactcttgttcatgccgacacgcctccttcggtcgactacgacaacgccacatcttcgacagcggattacttgtattatgccaagcaagtaatgacgagatacgccgaccgagtgccttactgggtcactttcaatgagatcaacaccggcataaacctccaatacgacacatatcaagccaacacaaatcttttgctcgttcatttgccatctacaggtgccaacaaagacgacgtcgccgctgccttgaggtatcaagatttcatcctcggagtctggggcaatcctctcttcctcggaaaacaatatccctccagcgtgctcaatacagctgtcaatctcactgccttgactcctcagcagatcgactctatcaagggctcggttgacttctgggcattcgacccttacgtttctcagctcgcttctgcccctgacgatggcctggcctcgtgtatcaacaactccagccacactctcttcccttactgcgccaacctcacacaaaatggcattcagcaaaatggttggcagttcggacaaaagtcgaacgactacgcatacatcgcacctcagtacgtccgccagcaactcggctatgtctggaagaccttccagcctgccggcggaatcatgattacagaattcggcttcaaccctttcaaagacgcagaaaagacattgcccgagcagcgctatgatttggaaaggacgttatacttccaagcattcttgacagagactttgaaagccatgtaccttgacggcgtgaaagtcattggtgcgctggcgtggagtttcgtcgacaacaatgaattcggatcgtatgagaatcagtatgggttgcagactgtcaatcgtacgagtggaaagtttgagagacactacaagcgcagcttcttcgaccttgtggatttcttccacaatcatatcgcataa

SEQ ID NO: 2494 - DNA, 1320 bp, Aureobasidium pullulans
atgtctatccgttcgctgctcagctttggcttgttggctgcacctctggtgtctgccctgcctgctgctgattacaagtcaacttcttgcagcaccagcacttcccacagtacttcgcactcgacttctcactctacctctcattcttcaactcacacttctactcacacttccacttccacccatacttctgcccacagctcttctgcaacttctgcagttgtcaccacgaccaccagctctgcttccaacactgtgcagactacaactcttgtagctacagctactggaaagaagggtctggatacttatgccaaaaaggctggcaagctctactttggcacagcagcagatgtccctggaaccaatgagaccaccgacaagtactaccgtgccgagctcgccaacaacgcagattggggatcagtcactcccgccaatgccatgaagtgggtctttaccgagcctgaacaaggcgtcttcaactacaccgaagcagaactcttcctcgccgccgcaaaccccaacggcaagagaaaagtccgctgccacaacctgaactggtacaaccaactccccaactgggtcacttcaggcacctggacaaacgagactttgaccgctgtgctgatcaaccacgtgacccacctcgtcgagtacttcggcgaccgctgctacgcctgggatgtcgtaaacgaagccctcagcgacagcggcacgggcaacctcgccgacaacagcacctggagatcggatatctggtacaacaccatcggccccaactacgtcgccgtcgccttcaaagccgccgaagccgccgtcaaagccaacaaactgaaggtcaagctttactacaatgattacaacatcgaaagcgctggcaacaaggccactgccgctcaagctctggtcaaaagcctcaaggatgctggaatccaaatcgatggcgctggtctgcaatcccacttcatcgtcggaagcacaccttctagagctgctcaaactgcaaacatgaatgcattcgctgctctgggtgtcgatgtcgccatcactgaattagatatccgcactaccgtccctgcaaccgctgccgctcaacaacaacaagttgtcgactacgccagctctgtaggcgcttgcgcagacgttgatgcttgtgtaggcgtcacagcctgggactttgacgatgcttacagttggatcccatcaactttccctggccaaggctatggagatcttttcttccagcctggtggttatggtactcctctggtccgcaaggctgcctatgatggatgtatccagggtctcaccagctag

SEQ ID NO: 2495 - DNA, 672 bp, Aureobasidium pullulans
atgtcctataacatcatgccttcgttcaagagtgttctccttgtcactgcatacgcagtccttgctttggctgctccagccagcgaaatcgaaaagcgcagtgagaccatcactaccaaccaagttggcacatacggtggctactacttttccaactacgtcgagactggatcagactccttgactcttggaactggtacctactctctgaagtggaccagcgccaacactgatgtcgtggctggtatcggctggcaaactggtgctgctcgcaccatcaagtacactggatccatcaatgctggtggtgacagtctgatcgcgctttacggatggaccaccggaccccttgtcgagtactatgtcattgagacctacggaacatacaaccccggcagtgctggaactcatctaggcactgtcacttcggatggcggtgtctacgacatctacgagaccactcgtaccaatgctccttccatccaggggactgctacgttccaccagtacctctcggtccgtcagagcaagcgcaccagtggtaccatcactttccagaaccacatcaacgcttggaagtctctcggcttgaaccttggtacctacaactaccagatcatggcaaccgagggctaccagagcagcggttcttcctcaatcaccttgcagtag

SEQ ID NO: 2496 - DNA, 1176 bp, Aureobasidium pullulans
atggcgattgggaacactggtcttatgcactcactcctctgcctctccgcctcctgcctcctcgctcatcagccaagttcagctcaagaaattatcgtccgccacagccaccacttcgaccgtgctgtcgtcaagctcagaaagggcgtcgaagcctacagctcagacaactccacacaaaatgcagactgcatcatgctgcagacgatactgctcgcgctggaggcgattgtcacaggagaaatacatggcagctatcgatgtcacctgttggccgcacaaagacttgtggacagttgtggagatttgagctcagacgtgcagagtttcgcccgccagttcctacagtaccacaatctcgccaacacaatctcttgcctcgaccccgtcaatgtcgtgaagtcatctatgcaaggatgtcagactgaaacaacggagcaggttctcttctcttcttctctccaactcaaaacaacaacgttcatttccaacaccgcaagcatgcacttctcttccctcttcgtcgccgcttcggcctttgttactgctcttgcagcccccgctgctgagcccgttactggtaacggcatgtcctcgctggtcgagcgctccactcccgccggaactggcaccaacaacggctactactattccttctggaacgcagggggcggaagcgttacctacaacaacaagggtgctggcgaatactctgtcagctggcaaaactgcaacaacttcgttgccggcaagggatgggccaccggctctgcccgcaacatcaacttcaagggtagctactctccccagggcaactcttacctctccgtctacggatggagcaccaaccccctggttgagtactacatcctcgagtcctacggcacctacaaccccggcagtggtctcacccacatgggtaccgtcaccactgatggctctgtctacgatatctacaaaggtgtccgcactcagcagccttccatccagggtaccgccaccttcaaccagtactggtctatccgcaagaacaagcgctcctctggaactgtcactaccgccaaccacttcaacgcctgggccaagttgggcatgaagctcggccagcacaactaccagatcgtcgctaccgagggttaccagtcctccggctccgccgacatcaccgtctcctaa

SEQ ID NO: 2497 - DNA, 1152 bp, Aureobasidium pullulans
atgcactcactcctctgcctctccgcctcctgcctcctcgctcatcagccaagttcagctcaagaaattatcgtccgccacagccaccacttcgaccgtgctgtcgtcaagctcagaaagggcgtcgaagcctacagctcagacaactccacacaaaatgcagactgcatcatgctgcagacgatactgctcgcgctggaggcgattgtcacaggagaaatacatggcagctatcgatgtcacctgttggccgcacaaagacttgtggacagttgtggagatttgagctcagacgtgcagagtttcgcccgccagttcctacagtaccacaatctcgccaacacaatctcttgcctcgaccccgtcaatgtcgtgaagtcatctatgcaaggatgtcagactgaaacaacggagcaggttctcttctcttcttctctccaactcaaaacaacaacgttcatttccaacaccgcaagcatgcacttctcttccctcttcgtcgccgcttcggcctttgttactgctcttgcagcccccgctgctgagcccgttactggtaacggcatgtcctcgctggtcgagcgctccactcccgccggaactggcaccaacaacggctactactattccttctggaacgcagggggcggaagcgttacctacaacaacaagggtgctggcgaatactctgtcagctggcaaaactgcaacaacttcgttgccggcaagggatgggccaccggctctgcccgcaacatcaacttcaagggtagctactctccccagggcaactcttacctctccgtctacggatggagcaccaaccccctggttgagtactacatcctcgagtcctacggcacctacaaccccggcagtggtctcacccacatgggtaccgtcaccactgatggctctgtctacgatatctacaaaggtgtccgcactcagcagccttccatccagggtaccgccaccttcaaccagtactggtctatccgcaagaacaagcgctcctctggaactgtcactaccgccaaccacttcaacgcctgggccaagttgggcatgaagctcggccagcacaactaccagatcgtcgctaccgagggttaccagtcctccggctccgccgacatcaccgtctcctaa

SEQ ID NO: 2498 - DNA, 1254 bp, Aureobasidium pullulans
atgaagatatactttcttttaccctctattctcgttgcaggcgcactcatgacaggctttgcccgtgctgtcaatgaacacaaccatccacgctgcgagtgtggctacacaatcaacgctaccagctcttcaagtcccttcgccctcttcaccgacctcctggaaaccgacttcctacatctttacaacctacctgacagtattgatgtacccgcctcggatgccgttggttgggccgtacaagcatacaatatctcacccttagtcgccagaggtcccttcggtaaagctgctgagatcgacaatgttgtcctaaacccactatctaggcgtaaagactggactggcaatggaacgctgggcggcgcccctggtcttcaggtctgggtcagaaatcagcaagatctacttggacccgtcggtgaccagatggttcggaccggcgaaatcaacagtctacgccgggacatgcgatatgggagcttcagagttgccatgaagatgagcgatgttccgggcacctgtgccgcgttcttctggtaccgcaatgactcacaggaaatcgacatggaatatctcagccgacaagccaattacgagtccgccaacggcttatctcccataaatctcgtcatccaatcgccagcctctgcgagtgcaaactacaacgccatcaacacaagcacttaccgcctcgagactctgccctttcaacccagcgaaggctatcacgagtatcgcttcgactggacaccagaacgcatcgttttcttcgccgacggtaaaccactctcagagttcgagaacgctttcgacggcgatgctcccgatgctcccggaactatgatgttaaatcactggtccacaggcaatgctggttggagcggtggtccaccagctcaagatgctgtccttacagtcagctacgtgaaggcctacttcaactcgagtaacgcaacacgagagagccaatggaatgctgcttgcggaggcgaggtctggcgcaatcgcacttgccaaattccagactatcctactcagggcattgacccacaacgcatgggaatgaaggacccaggcaagagttacttcttcatgtatgatgaatactgcaccgtcaaccaaacgctgtacccagctgccactggcggaccaagcaaatcgaatggtgcttctcctctactgtcgacgccggaaacgtggacgatactcggctggacggcgatattcggcctatttctgcttgctagttga

SEQ ID NO: 2499 - DNA, 1206 bp, Aureobasidium pullulans; identical to SEQ ID NO: 2112

SEQ ID NO: 2500 - DNA, 1368 bp, Aureobasidium pullulans
atgaagacattccacgctgtggctgccttgaccgtggcagcggcctcggccgttcaggccatgatcacctgcgactccaacaacccttgcccttcaagcgctccttgctgctcttcctatggattctgcggtgttggcgcctactgtctgggaggatgttaccccaaggactctttcagcatggactcttgcatgcccgcacccgtctgcaagtcgtccgattatgactttaacaacatgaatggctttattgagaacacggaatacttgggcgacccgtcaagcggcaattgggtcttttcaggtgacccgctgatgtacaacaacgaggctgtcttgctcaccatgactgaggactcgtctggtactcttctcagtagcacacgctatgtctggtacggcaagatgagcgccaccatgaagaccagtcgtggtgccggtgttgtcactgccttcatcatgatgagtgacgtaaaggacgagatcgactttgaattcatcggtaccgatgttcagactgcccagagtaactactacttccagggtatcactgattacggaaacgaaaagaacctttcttctcccaacactgactctcaatggcacacttacacaatcgactggcaacccgactcgctcagctgggaggttgatggcaaggtccttcgtactctctaccgcaacgagacctacaacgagactgccggccagtaccactaccctcagactccttccagagttcaattctctttgtggcctgctggtaaggctggcaacgctcaaggtaccattgaatgggctggtggtgagatcgactggagcagtccttacatgcagaacggctactactacgccatggtcaaggacgttaccgtcgactgctacaaccctcctgctggctacaacaaccaaggcaacaaggcttactggtacgagaacaagtatggaaccaacgacaccgtcgtcgttggcaataacggtactaccttgtcatcgttccttgccactggtgaagagcccaagaagggtgccagttccagcgcaagcaacactgctaccaagagcggcggcaagtcgtctgcttcatcctctgcaactgctcagcctgagactattcctggtgtttccggtggtggttcgcgcgagtctggcagtgatgtcgctagcggctctggctcatcatcaggcagcagtggatcgtctggctcgtcgggctcttctggatcgtccgattctggtgccaacactggatccagctccttctctcagggtctcgagactggcagcggtaccaacgatggcaacagagttgtcgccggcagccttgtcgcgctcgtggccttctttgccgcagccatgatgctttaa

SEQ ID NO: 2501 - DNA, 1167 bp, Aureobasidium pullulans
atgcgagcgacgctgctagtgctaatcgcagcattagcatatgtgtcccaggcgtcacgctatgttttgtacctgaccgctcagcacgaggtgtaccctccagcggttcatatcgcggatgtgacgcacgtcacactggctttcatgaagtcttctatcttcaatggaaagcccccgtccaaatggccactctttaccgatgttgaaacagtgcgaaagaagtttcctaagaaagatcttgcagttctgatagccattggcggatggggtgataccagaggcttctccgccgcggctgcatctcagatgggcagaaaagcgtttgcggaaaacattaaggcaatgcttgactccaccggtgcggacggagttgaccttgactgggaatacccgggcggcaatggtgaagattacaagcaaatcaccaattccgaaaagagctgggaggttggggtatatcctaaacttctcgccgagatccgagctgccatcggacctgacaaaatcatgtcagcagcagtcccgggcaagcccgtcgacatccaagttgccttcaccaaagatacactcgtggaggccatgaagtatctagactacgtcaacatcatgacatatgacttgatgaacaggcgtgacaatgtcaccgcgcatcacactggcattgacaattctctgattgccatcgatacgtatttaaacaatggcgttcctgctgagaaagcgaatttgggatttgctttctacgtcaaatggttccggacgacagaagagtgcgctcagaaggctttgggctgtaagacagtcgagatggaagacccgaagacaggcagggacctagggcaaagtggagctttctcatggcacgacaaaatcccaacagagctcaagaagtctttcgaaaaggctgttcccaacgctatgtacgacgatgacggcaactattactgggacgcagaagagaagatcttttggtcgtgggatacccctgcttccatggcgaagaagtttccagccatcgttcagcctcgtaagcttggaggcgttttcgcgtggggattaggagaggatgccaacgcattcatccatttgaagaccttgaatgcagtctttagaaagtatctcaagctaaagcctaagggtaaccgaccagcaaaagatgagctctga

SEQ ID NO: 2502 - DNA, 1422 bp, Aureobasidium pullulans
atgaagttgcctttcatagcgccactggtgcttacaatctcctcgtccatcctccattgttcagcgcaactcgttggtccagtaggaccgactacctccttgacccaaaagactcacatctgcaacatcctcgactacggggccgtcgctgacaatgtgactgacatatcgtctgccctgcacgctgccttcgataattgcgttcagaggaatcaagggtctcgactttacgttccaacgggaaactacctgctcaagcagtctgtggtgttaagcaacgcaacatcctgggcattgcaattggacggtctgatcacggcggcatatggtggtgactggaacgttgaacgtgagctcattcttcaaggttttgctggtaggcagaagcttggtgaacttattgatggagagggtgacaagaattttctcttagatgtccttgtcatcgtcaacgctgttgatttcgagttctattcgtcgaacggactcggagctattcaaggtcagggatatctctatcgaaacttgaacaacaacgaccgaccacgactcgtacgactgatctcgcccaccaacgcgtctgtccacgacttgatcctggttgatagccccaaattccactttgtttttgactacggtctcaatattgaggtctaccatcttacaatccgtggcgcaaatctgggaagctacgatggcatcgatgctgtgactaaccgtgacgaatgtgtctctgtaaagagcccgtctaatcacgcactcgtcgaaaacctgctgtgtaaccaggctggctccggcatatccatcggaagcttgaatgtctctgcacaaatctcgaatattcacgcaagaaacatctccatcctgaacggcaacaatgtcgccttcatcaagacttatccggggggctccggctacgtgaccaacgtgacttgggagaacttccgcagtaaagccagtctatacgggttgagtatcaaccaatactggcaaaacacattcactcccgacacaggcgctgtagccctgagatctgtcgcaaacggagtacaaagaccaccgctttacctggttgcgaatgatcttacgttcgcgctgaacgtcacggttcaagacatcaaactctggaccgaggcaggaagcagtgtggtgaaccacatcaacaatatttttggcagaggcgacaacatttatagcccaggagatggcataagaacgtcacctgccaacggaacgccgacctcatatagtagcactatcaccgtcacgcaagcaccaacaggttgggtggggccaggttatcctgcttgggctgttccgacaactggatatggcacgaatgtgccgataccagtgtatacgcctgctgtgttgtggaagcctactggtgattatgacaagcattattggggctctttctga

SEQ ID NO: 2503 - DNA, 1314 bp, Aureobasidium pullulans
atgatttcaactaatctctggacacttcttgcgttggcgactcccatagtgtcagcaggtggtggtgtgcattactccactcatggaaaacgacctcaatgcacagtactcgccaatggaggctccaccaacgacgttcccaacattctcaaagcatttagcaaatgtggaaacggaggcgacatcatcttcccagaaaaccaaaactactacattgcttcaaagttgaatcctgttgtaaacgatgtcaatattgattggcagggcatttggactttttctcccgatattgagtattggagacagaatagctctacctatccgatcgctttccagaatcatgctgcctcgttcatcttgacgggcgatcacattcgcattaacggatatggaacaggaggcatcttcggaaatggtgatacctggtatactgcggaggctggacataccgtacccggcagaccaatgccaatggtcttctggaacgtctcggatgtgacagtaaagaagttcttcgtcaaggatccacctctgtggagtttcaacatcatgaatggcacagacatgtggattgacgagttatactgcaacgccaccgcaacacaagcaaacgcaagtcagaattgggtgcagaacaccgatggatttgatacgatggactcgaagaacatccgtctcaccaacttcgtataccaaggtggtgacgactgcattgccatcaagcccagatcttacaatatcttcgtccaaaatgcaacctgcagaggaggcaacggcatggccattggcagcgtagggcaatacctcgaggacaacactgtcgagaacgtaatcgtggatgatatcatccgctggaacgaagatatgcacggctccgtcctgattaagacctgggtcggcgccctggtcccacagaacccgtccgcaaacggctactacgaaaatgcaggcctccctcgcggtggcggctggggatccgtccgtaacatccacttctcaaactttgtcgtccaaggcgcagatgcaggtcccaccatcgatcagaactcgggcaacaatggcagttttgcgggtaccagcttgatggatataagcaatattgcttttaccaacttcactggctggttgtctggcaaggagtccaaaaatcggacggcaagtgtgagttgttcgaaggtgcatccgtgcttcaacatcaatttcgacaatgtcacgctgacgacggcgcaaaactcgacgagtacggggacgggtagttgtagttacatgtcgcctggaggtgtgcatggtctttctggaagcgggtgttcgtaa

SEQ ID NO: 2504 - DNA, 1398 bp, Aureobasidium pullulans; identical to SEQ ID NO: 2117

SEQ ID NO: 2505 - DNA, 2913 bp, Aureobasidium pullulans
atgtccggtttcaagagtcttgccctgctattggcagctcagctcgccaatgctcagggtggctaccctaatcctcccgttgatggtttgcctttccctggtaccaactaccctggctccgaagtcccctacgccgtggctggtgcaaagttcaaccagacctctcccccttactacccttctccctggggaaccggtgctggagaatgggcaggtgcttatgagaaggccagagcattcgtctctcaattgactctggccgagaaggtcaacttgaccactggtgtcggttgggagtctgagctctgtgttggtaacactggttccatcccacgtctgggcttcaaggccctctgtctgcaggactccccattgggtgtcagattcggtgacttcgtttccgcattctccgccggcgttactgttgctgccacatgggacagaaagcttgcctacgagcgtggccatgatatgggcagcgaacaccgcgacaagggcgtcgatgtcatgcttggtcccgttgttggtcctcttggccgcagccccgaaggtggacgtaactgggaaggcttcagccctgacccagtcctttctggtgttctgaacgccgagaccgtcaagggtatccaggatgctggtgtcattgcttgcactaagcactacatcctcaacgagcaggagcacttcagacaaggaggtcccaacatctccgacgccgtctctgccaatgtcgacgacatcaccctccacgagctctacgtctggcctttcgctgatgctgttcgtgctggtaccggcagtgtcatgtgctcttataaccaggccaacaacagctacgtctgccaaaactctcacctcctgaacaaggtcctcaaggccgagctcggtttccaaggcttcgtcgtctctgattgggctggtcaacactccggtgtttccagtgctctcgctggtctcgatatgaccatgcccggagatgtcagcttcgacagcaagacttcgttctggggtgccaacctcaccatcgccgttttgaacggaaccgtaccccaatacagaatcgacgacatggctgttcgtatcgttgctgcctggtacctcgtcgacagagaggacactcagctcgaggatggccccaacttctcctcgtggacctcaagaaccgaaggataccgtcactacattgcccaagaaggctttgagaagatcaactctcacgtcgatgttcagggcaaccaccgcgacaacatccgcgaggtcgctgccaagggtactgtcctgctgaagaacaagggcggtctgccgctcaaaggaactgaacaactcgtcggtgttttcggcgaagatgctgccgacaaccaatacggtcccaatggctgctcagaccgtggatgtgacaacggaactgccaacttcccttacctggttgcccctcacactgccatcgagaatgaagtccgctcccacggcaagtctgtcgagagcatcttggacagctacgcctacagtcagattgatgttcttgcccaacgcactgacgaagtcaatggtgcttgcattgtctttgccaacgcagatgctggcgagggctatatcatcgtcgacggcaaccaaggagaccgcaataatcttactctctggcaaggtggtgaggctgttatcgaacacgtctcatctctctgcaagaacactatcgttgtccttcacacagtgggtcccgttctgatcaacgattggtacgaacacgagaacatcactgccatcctttgggctggagttcccggacaagagtcaggcaacgccatcgtcgatgtcctctacggcaaggtcaacccctcaggcaagcttcctttcaccatgggtaagacacgcgagtcgtacggtaccgatcttctctacgagtacaacaacggtggtgctcctcctcagacccaattcgaggagggtgtcttcatcgactacagagcctttgacagaagcggtgaaacccctgtctacgaattcggttacggactttcgtacaccaacttcagctattctgacatctcggtctcggtcaacaccgctgctcccgcctacaagcctaactcaggcttcaccgatgccgcccctatctacggcactgtctcgaacaactctgccgactacgtcttccccgatgatgtcagacgcatcgagtactacatctaccccttccttaactcgaccagccttcgcgcttcctcaggcgacccctactacggcagcaactacagcttccccgccggttcgtcatccagcgcaccccagcctctccttcctgcttcaggagcatcaggcggtaaccccggtctgtacgatgtcctctacaccgtcactgccactgttaccaacactggtgccgttgagggcgaggaagtccctcagctctacatctcccttggtggtcccaacgacccggccgttgtcctccgccagttcgacaagttctcaatcgcccccggtgcctccaagaccttcactgccgagattactcgcagagacgtcagcaactggagccctgagcttgacgactggtacgtcagcgagtaccccaagaccgtttacgttggttcttccagcagaaagttgcctctcaaggctgctcttcctgctaatggtgccacttctcctggtactggtaacggtggctccggcaatggcacctacaccgttcctcccgtctcagtctctagctctgcccctggcactgccacccttccctcttcctcagcttccaagtcctcgtcgagctcgaagtcatcatcgcactctgccagccattcgacctccaagtcctcgtcccactcgtcttcgtactccactaccaagacccatggtccaacctcgtggaccacctacaccatgcccactggctaccactctacttcatag

SEQ ID NO: 2506 - DNA, 3939 bp, Aureobasidium pullulans
atgaaaaccagtttagccgttctaggcgctgcaaccctttgtgcagcctctgtctccaacactaccaaagacggccttatcaccaatggactcgtctctcttggagattggcagagtgccttcgacaaagctcaaaactttgtctcacagcttactaccgaagagaaaatcaccatcatcggagctggatctctgaccaacacctctgcaaattggacagctctcgggatttcggatggtccacaaggagcgcagaacttctactacgaaagcgccttctcgatgacatgtgccttggctatgacttgggacaaagacgctatctacaaacaaggcaaagctgtcgctaccgagttttaccagaagggcttgcaaatgttggctgggcctgtatcaaaccccatgggcagatcagcttggggtggccgtaatggtgaatcgtttggaccagacgcctattttaacggtattctcggtggcatcagtgcaaaagcctaccaggcaggtggtgtcatcgcaggtggaaaacatttcatcctgtacgagcaagagactaatcgtacttcttccatgagcggtggtggtggtatgggaggcggcatgggcggtggccccaccggttcaggcaacagcactatgggcgcttcaacatctggctctgccccgtcaggctctgctccgtcaggaatgactctcaaagcaagagcagacaattcatccactacccaatcttcgaccgagagtgccccttactcgtccaacatagacgacaagacgtttagagagacatacctctggccttggtacgacatcatcaaggctggaactggtgcagtcatgtgcgcaatgaccgaagtcaacaacactgcagcttgtgaagatagctcactccttatgggcatgctcaaaactgatcttggcttccctggaatggtttggccggaccagaacggtcaaaaaacggctcttgggtcagccacaggaggccttgactacggttcaagcagtacctggtctacatcaactatcgaagcattcttgagcaacggctctctttcagaagcccgtctgaatgatatggttatccgcaatgttattggctactacagagccaatctggacaacggagaacagccttccaaggcagactacgatgactacgtcgataccatgtccgaccacgccaacatcattcgtgagaacggagcgaagtcaattgttcttcttaagaacgatggcgctcttcctctgaacaagcctagaagaatgacactcttcggtgccaacgccggacctgtcatgggagggcccaacctgcaattcactgttcagggctctgggccaacataccaaggccatcttgctagtgattctggctccgctcaatcttcgctaccctatctcatcactcctgaagcagctctgacgctcagagcatcgaaggaacataccaatgtcaagtggatcttaaacgacacatacagtacgagcagctcgggcaacactctggttactctatcttcctcagagactgctgtcgatgcttcttatgcgggatatgcggccgccagtgacgtatgcctcgtcttcattaatgctctatcaggcgaaggtgccgatcgaactgagttgtacaacaaggatcaggacaccatggttaacaccgtggctgccaactgcaataacaccatcgtcttcattacttccactggtatccgccttgttgaccaatggattgagaacgaaaacgttactgctgtgctatactctggtcctcttggtcaagaaagtggcaactcaatcaccgacgttctctacggcgatgttaatccctcaggtagacttatccacactatcgcaaagaacgagtcggactacaatgtagagatttgctacacctacaactgcaactacaccgagggcaactacatcgactacaagtactttgaacacagcaacaccaccgctcgttatgctttcggtcacggcttgtcgtacacttccttcggctacagtgacatcaagacgaccaagctcatgtccaacctgtcataccacgccaagggacgtcttgaagttggcggccgtgcagacttgtacgacgtcgttgcagaggtcgatgtcaatgtgcagaacaccggttcgcgtgacggagccgaagtcccacagctctacattggctacccagagggctctggggctgatcaacctctcaaggctctccgcggcttcgagcgtgtagagatcaagaaagacgaacacagccaggtcaagttccagctcagacgcagagatctctcgttctgggacgtcactgcccaggagtgggctttgccgactggtgatttcaagatttatgtcggcgcttcttccacagacattcgacagacggagggtggagacggtggtctgttgagattaaacctctggctgggctcaacgatcaacattgagggcgagcagtcaaatgcctgtttcaagcagacctacccggagatcgatatgtgcagagtcgtcttgactgtggccaccagtcctacttcacacaattacatggaggtgtggcttcccagcggcagcacaccctggaacggccgactcttgggtactcgcaacggcggtctggccggctgcatcgaatatgaggatatggcatactactctagcttaaacttcgctacagtaggagataatggcggtcacaatagctccacttctgatggttcgaagttgctgaacaacaatgaggccgtaatcgatctttcctaccgttccaggcatatttcggtcgttgccgcaaaacaagtcatcaagcagtattacagccagcctgcaagctactcttactatgttggttgcagtactggtggtcgtcaaggtctcaagtctgctcaagagttccctgacgattttgacggaattttggccggatcttctgcctctgacttcaatcacctttcggactggacttctagattcctgttgatcactgggttcggcagtgatgctagagctctatctaaagatcagtgggtctatgttcacgaagaagtccttgctcaatgcgacgagcccctggatggcgttgcagacggcattctcgaggatcccacaatctgcgagttcaacgctgctgctcttcaatgtggcaccagctccgactctcgctgtctcacccagactcaggtccagactgtcaacgacgtctactctgaactctacgaccagaacggaaacttgctctacccttctctgtctctcggagccgaattggttgcttcccagcagggtctcttcaccggctcagtcatcggcaatgccgcaaacttcatctccaacgccgtatacaatgacagcaactgggacccccgcagcctgagtcaagagacctttactagagcagatgagaccgatgtcttgcacggaaacatttcgagttggaacggcgatctcagtgccttccgcagagctggcggcaagttgatgatgtatcacggtatggcagaccctaacatcgctggcgagaactctcaacgctactaccttcacgtcgccaaaaccatgggtgccagcgacgaacaattggacgaattcttccgtttttaccgtatctctggtaacggacactgctcttcgggtggcgagggcgcttgggaatttggacagatagcagctgcacgaaacggaaaattcagtgccgtccagcagctggtggattggaccgaaaagggtatcgcccctgacaccatcaccggaaccaaattccacaacgacgaccccaaccagggtgtcgctttcgagcgcagccactgcagattcccttaccgcactacgtacaagggcaacggcctcgatcccaacgtcaccaccagctggacatgcgagaagatcaacaactggcaggagtgcggccctggtgcacttcccagactctgttaa

SEQ ID NO: 2507 - DNA, 2886 bp, Aureobasidium pullulans
atgaaaggactcttcaagagcttgacgctctcgttaccattgagtcttgccgctctctccagcgcacaggaagctcaatggccgcttcgaagcaacggcctcactgacttggtcgagtgggaccactacagcttcaaagtcaatggggaacgtctattcatctggtcaggagagatgcactactggagaatcccagttcccgaactctgggtggatgtcttgcacaaggtcaaggctgctggtttcaatgcagtctcgttctactctcattggggataccacgctcctcgtgacggtattgtagactttgaatctggagcccacaacatcagcagcttgttcgagacatgcaaatccctgggtctatacatattctaccgccctggaccctacattaacgcagaaagtactggcggtggtttcccaggctgggtcacaactggtgcctacggatctcttcgcaacaacgacacgagatatactgaagcctggaagccctacattgagaccgtcaacggtatcattgctgagcactctattgtcaatggcggcaatgtgattttctaccaggttgagaatgagtatggttaccaatggaccaacaccgctcagagaacccccaacgagactgccattcactacatggagcttctcgagactgttgcaaacgacactggtatcaacatgcctaccgtacataataaccccaaccttagaagcaagtcttggagcatggactacgatatcaacgacgttggtggtgacacctggctttatgcagtggataactacccttcttgctggagttgcaaccttcaagagtgtagttctaccaactctcctgcccctgacttcacagtcctcgactactacactcacttccaggagactgctcctggagatccttctttcttcgctgagttccaaggtggaagctacaacccgtgggatggccccgcggccttccctttggttggaactagttacgactattctgctcctattcaagaggaccgcctgattggcgacaagtactccgagacaaaactgcttggatacttcattcgctctgctaaggaccttcctctgatcgagagaggtatcaacggcacaaacctcactacgagctccaacgtgttcacccaggtcctgtacaacgtcgagaacaatgctcagttctacgttgtcagacacgccaatactagtttgcagacttctctctccttcaagcagaacatgaccacctctcttggaaacttccaggtgcctcagcatgccgctgatatccgtatcaacggaagagagtccaagatcctcgtttccgactacaacgctggagatcagaagatcatctactctactgctgaagttctggctgtctcaatccaaaatggcaagcccatcatcgtcttctgggttcctactggcgagagcggtgaattctacctgaagggcgcgcaaaacggtaacgtcaagcaatgcaatggctgctccagtgttggcttctaccaaaccaaagatggcgtcattaccagcttcgctcagggttctggtatgagcgtcttccagtatggtaacggtgtcactgctgtcattgtggacagatcctatgcttacaagctgtggcaccctaccttgactaacgaccctcatgttcctcttgacaagactgcattggtcactggcccataccttgtccgtacagcagctgtaaagggagacactctcgcccttgtcggtgattacaacggaactactcctcttgaagtctttgctgcaggtgtcaagaaggtcactttcaacggccagagcgtctctgtcaaggcctcggcctacggcagtctgaagggagagctttctcacgacaaagttactgttcagtcgctgaatgccgcactccctaagttgtcgcaatggaaggttgctgatggtcttcctgagcgtgaggccagttacgacgactcaaagtgggtcaatgccaaccacactaccacacctcactggaataagcctgccaccgaccacattctttatgccgacgagtacggtttccatggcggtaacctcctctggcgtggacgcttcaatggcacaagtagtggtgctttcatcaatgtcattggtggtactggtagtggttggtctgcttggctgaacggcaagtttgtcggatcaacattcggtgacatcaagctctcccagaccaatcagactctcaagtttggtgatgcagtcaaagctggagagaatgttcttctcgtcatccaagaccacatgggcaaggaccagactactggtgccatcaatcctcgaggtatcctcaacgccactttgaccgacggtgcgaagttctcttcgtggaaggtcgctggtaaggccggtggtggtgccaacatcgaccccgttcgtggtccttacaacgaaggtggtcttcacgctgagcgtctcggctggcatttgcccggcttcgacgacagcaagtgggcttctggctctccttctactggcctcagcactgcaggtgccaacttctaccgcaccacacttcctcttgatctgcccgagggacatgatgtctcattggctttcaaccttcacgcgaccaagagtaagaagctcagagctcaactctatgtcaacggttaccaatttggcaagtttgttccatacattggtaaccaggttgagttccctgtcttccctggtatcttgaactatcatggcaacaacactattggtctgtcgatttggtctcaggacaatgttgaggcaagcgtttccgttgatgtcagtgttcttggtgtgcactcttcaggcttcgatgtcgggtttgattcaacctaccttagacctggatggacgaacgagagactgcaatactattag

SEQ ID NO: 2508 - DNA, 3957 bp, Aureobasidium pullulans
atgcgcattcttccatatcttgcattgattggcttggcctttgcagaagacggcctcagcggatggctacgatatgctcctttgccttcctcggtgtcatggccgtatattccacacaacatcgtcgttttgaacaccacaaagactagtccagtctacacagcaggtcaggagttacaacggggtatccagagtatcctcggtcaagactgtcatgtatcatctgacagcacgcacgagtccatcattgttggcactctcgatgcatacgttaatgcttatggcaacctttctcagactgttgatctcaaggaagacggcttctggcttagcacggaaggcaacactgtccagatcctgggtcagaacgagagaggtgcattgtacggagctttcgaatatctatcaatgctggcacaaggaaacttttcatcagtcgcatatgcatccaaccccgacgctccgattcgctgggtcaaccagtgggataatctggatggcagcatcgaacgcggatttggtggtgcttctatcttcttcgctaatggatctatcgttgacggcttgactcgcgtcgcagaatatgctcgtctattggcttctgtaggcatcaacgccatcgttgttaataatgtgaacgcaaattcaacaattttgactcccgacaatatcaacggccttggtcgtatcgccgacacaatgcgaccttatggtgtacagattggtctatctctgtactttgcatctccaacacaaggcatcaagggccaagcgaacctcacaaccttcgaccctgtcgatccagaagttgtcgcctggtggaccaacgtaacttcccagatctacgacgtgattccagacatggctggttatctggtcaaagcgaattcagaaggccaaccgggaccaatcacctacaatcgcaccctcgcagaaggagcgaacctcttcgcaaaagctgtgcagccgtatggtggtattgtaatgttccgcgcttttgtgtataatcaactcaacgagagtgactggaaggctgatcgtgcgaacgccgccgttgatttcttcaaacctctggatggagagtttgatgataatgttgttttgcagatcaagtatggacctattgatttccaagtcagagagcctgcgagcccgttgtttgcgaatttgaggaagactagtatggcggtcgagttgcaagtctcgcaggagtacctaggtcaacagactcatctggtctacctgccgccgctttgggagactgtgctgggtttcgatatgagggttgacaatgagacctcactggtcagagatatccttgcaggcaggactttcgagcggtcgcttggtggttatgccgctgttgtcaatgtcggaaccaaccagacgtggctgggaagtcatttgtccatggctaacttttatgcgtatggtaagcttgcttgggatcctactcaggacaccacgatgattcacgaggactggacaagacttacttttggcttggatcaagatgtcatcgacaccatcacccagatggctgtcgaatcttggccggcatatgagaactacagcggcaacctcggcattcagacattgaccgatatcctctacactcacttcggacccaacccgcaatcccaagataacaacggctggggacaatggacacgcacagatcacgatactattggaatggaccgcactgtctccaatggcacaggtttctcaggcacctacccaccccaaaccgccgccatgtacgaaaacatctcaaccacacctgacgacttactcctctggttccaccacgtcccctacacgcagcacctcaaatcagggaaaacagtaatccagcatttctacgatgcccactacgccggtgcagaaactgctcagacatttgctccacgctggcaatctctgcaaggcaaaatcgacgaccagagattcaacgagcaactataccgcttgcaataccaagccggtcattccatcgtctggcgcgacgccattgtagatttctaccacaacatttccggaatcgctgatgaccacaatcgcgtcggcaatcacccatggcgcatagaggcggaaaacatggacctgaatggctacaaaatctacaccgtcaatccattcgaaacggcatccaaccatcacgctgtaataacctcttcaaactctactgttggctctatatccaccaccttatcttttccttccggaaaatacaacattggtgttaatttctacgatttatacggtggaaagtcgaggtttgagattcgtgttgcgaatgaatcaggtcgacccgtgtattcaagtaatgagttcatgccattcataagcaagaaatctgttactggcatggctcttcacgtccttgcagaggcctctggtagcaaagagagccttgatctcgcaagtatgatttgcgtttgtgcgtacgccggctacttcctgcaagagatcgtgctatcgaagggaagcaatgagacaggtttcgaaagcgtcctgcatgctcgagcgtgcggattctttgcaacagcgagagcttggatgacgaagttgctcgagagcccacatacaagacttgcggagctacaagctctcacctttggctgcatgctcgctcaagaagccggagatattcctgcagcccgtgcggcactgaaagcttgcagtgatctctgtatacgacttgagctcaacagacacatcaacgctcgtggttatgagtgtgatgaccaggatctcgaggcatattattgcttcgcgctctgttacttgaatgacaaaggtatggctttgaactcgcttgagccttcattcatgaacgatgctacgatagacctggaagtcctgcagcatcctgactcaacggtggggagcactgacaacttttcaatataccttgaacttgcgcaggttcagagcaggatcacatcggagctgttacccgcgaagtccaactcacggccccgagccaccattatctcgagattggcggcggagatgaaccaaatctggcactcgaaaattaggtggcaaactcggctcaatcaagattcggtatcccgcaatgccacatgggagatggagtcaatcatacttgacttagctttcttctccatcttgactgtgatacatcactcgagcacgcacactgaggctgcatataacgccggagacccttgtctggatgcagctcgcgaggcggcctctcgactgcagaggattagacagctttcgcagacattgcgatacagtagtgactacatgaagaattcttttgtgcatggcacaatgctgttttaccctttcacgccattcttcgtgctgttctgcaacgtcatccaagtctatgactatgcggattatcaccgcatgaaatatttcgttgactttctgtccgagctcaagaacatttcgaagcatgagtttacaccacaagatcttggaaataagagcgtccagaatgagcaattcgcacagccaaacacgccagtcgcaaagttgcatgcgctttgcaagaccttttgcgacctggcggccggtgtactgagaggcactgccgcagcatcaaagtcattcccgcagcaggctttagcgccacgcacaagctgtgccgcctcctcagcactccacgagggaacaatgccatcacatatacatctctgggacgactctcagaatcattaccatataccgagcagtaccttgtcgacgaacggacttgcggcgcccctccagcagcaacaagtcactcccaacaccaccgacccttcaaaaacatactcgtcacattatcacgctgctgagacagcagtcaacgaagacttttcctggctctccgatttcgcagcgacacaaccggtgctacagtggctggatgccgatctttcctgcctcgactcaggcagctgggattcaaacgaccctactcctctctga

SEQ ID NO: 2509 - DNA, 1647 bp, Aureobasidium pullulans
atgaaggttctaccattcttatacgcaattccattggtatctgccattggcagcagacagcacaagcgcgacgtggagaccttgagtttggagaagcgtgacatcaaccctgagctcttgtatcctgaatacaacatctcagtgcctgtagaccacttccacaactctactctgtacgaacctcacagcaatgccactttcgatttgaggtattggtttgatgcttcgcactaccaaccaggaggtcccgtcattgtgctacagtccggcgaaaccgatgcttctggtcgtctgccctatctacagaagggtattctggcacaactggcccaagcaactcacggtattggtgttgtgctcgaacatcgctactatggaacatcattcccgactcctgatctgtccaccaagaaccttcgattcttgaccaccgaacaagcacttgcggatgaggcatattttgcaagaaacattgtcttccctggactcgagcatctggatctgacgagtaaatctgctgcatacctcggatatggcggatcgtatgcaggtgctttcaacgccttcctccgtgtcgtctatccagatgtcttttggggaacaatctcgagttctggtgtgaccaaggccatctacaactattacgattatttcaccccaatcgccgagaacggacctccgaagtgtatctctactcaaaagactcttatccacattgttgacaccattcttttgaagaaccagtccgagctcacacatcaactcaagacggcatttggtctcggaaaccttacttacgacgatgactttgccagcactttgtctagcggcattgaaggctggcagagccgtaactgggatcccaaggtcggtagtctcggcttcgacagatactgcaataacatttcatctgatgcaatgctttaccccgctgcatcctcgctccggcctgttgtggagtctctgatcaagaacaccaactacactgtcgaggagaccttggtcaaccgcatgctcaacttcattggctacgtgaaccgtacttctgtggcctcttgctctggtgggagcacacaggacgagtgtttcagtaaccacaactcatccacttaccagcaggacgacttggcttcatacacctggcgctcatgggcttaccaatattgctccgaatggggatacctccagactggatatgcacctccaggccaattgcccatcgtctcgtctctccttgacttagaatacgaaagtattgtgtgcgttgatgccttcaacatcacgactccggcgaacgttgacgcggtgaacaagtacggtggctacgacatcagttacccacgtcttgcttttgtcgatggatctgccgacccctggcgtccagctactcctcacgcatacgcccagggtgctaaggagcgcaactctacttccagtgagcccttcatcttgattgacggagctgttcaccactgggacgagaatggcttgttccccaacgagactacggcctccctacctcccttgccagtcgccgacacccagagacaggagatacagttcgtgcaagaatggatgcaagagtggcagttggagcagcagatcaaggcagcttatcgtaagccagccacccaggggcccatctga

SEQ ID NO: 2510 - DNA, 984 bp, Aureobasidium pullulans
atgacgccgctatcaattctaattcttggtgtattggctgagttcacctctgcctttcccggcatgggaaacatgcgaagagaggctggtgtgctccctcgcagagccgcggcctctgctgttagttcagcaaacactgctgccagtacctacccagcctggcatccagcacagaagggagaagttcgctcaccatgtcccggtctcaactccctggccaatcacgacatttgtccacgaagcggcaaaggatatactattccagtcttgactgattgcttgaagcgaggcttgaacgttggcggtgacttcgctctggtcgtaggcacagcaggcattgggtccaaccccagccctctgacctctggcttgtacttcgaccttgatatgctggatcgacatgactttttgattgagcacgacgggtcattgtctcgtgccgacaccaccacgggcgacaaccacagtttcaaccaaaccatttgggacactgtcctcgcgtactacagtggtatgacagatgctaccattcctgttgcgtccaaagccagattcaaccgcattcagacggaagctgccagagaccccaacttcagctacagccctgtccaattcatcctatcgtatggagagaccgcactttacctgtccacgatgggtgacccaatcactggagttgctcccttggagtacgtccgcagcttgttcgaagaggaaaaactcccttacgagcttggctggcagccaccaaagacgacgacaacattggccagtttgggagcgatggctcttcaactcaacctcgcgagcggtgaacaggttcctgaaggcgtgattctgggagaaaagagtctgagagcggcactgatcggcctcaacgctgccaccggcgagatcgagaacaatgttgtctatgctgtcgcgaagctgactggtgcgctcggtagcttgaccggtgttttgaaaggcttgaccggttcgtag

SEQ ID NO: 2511 - DNA, 2028 bp, Aureobasidium pullulans; identical to SEQ ID NO: 2124

SEQ ID NO: 2512 - DNA, 1692 bp, Aureobasidium pullulans
atgggtgcattctcccacttgactgcagcagcagtgcttggactatcagtagtcgtaactgcccagaactcgagctcgtctgctgctctacctattgtcgaccttggatatgctcgtcagcaggcttcatcattcaatgtaactggaggctactacaacttttccaacatccgttatgctgcccctccaattggcgacctccgttttgcagcgcctcaagctcctgctataaacagaactcaagtccaaactggtagcgttagccgtatctgtcctcaagcaaacccagcctggaatgccattgctgcacagttcatcccagcgtacttgctaggacagacaaactttactatgtctgacttcaacctgaccacctccagcaacacaactgcagccccagcgagagaccccagagaaagcgaggattgtcttttcctcgatgtcatggtcccggaaggcattttcaactcaaacgagcagcatcccgttttggtctggatctacggaggtggatacactgccgggtccaaggctggatctggtaaccccgcaggattgctcgagcgctctcaagcggacaactctagcggcgtcatctatgtgtccatgaactaccgtctcggcgctatgggttggctctcaggtcccactttccaggagaacgctacagcaaacgctggtctgcacgatcagaggtttgctctcgactgggtgcaggagaacatccatctgtttggaggtgacccgaaaaatgtaaccgtgtttggtgaaagtgcgggaggaggttcaatcatgcatcagatcactgcttacggtggaaacaaaggtccggttccttttgcaggcgcagtaactcaatcacctggcttcttccctgttgtctctccagcaacacaggagggtgtgtataacgatttcctcgccttgctaaacgtatccaccttggctgaagcacgccgattgccttcgtctgccattattgctgcaaacgcaaaacaagtcgtcgcagcatcctatggccaattcgtctacggacccgctgtagatggcgatttcgtacctgctctgcccggccaattactcgctcgtggccaattcgacaagaacgtctccatcatgaccggtcacaacgcagccgaaggtctgctattcacctctcccttcatcaacagcgatgcagcacttagagacttcctgaccatgagcttcccggctctcagctacatgccatcaacactcaactacatcaccgaaactctctaccccccaattttcgacggcagccaagctcaaaactacacaaaccaaatcggccgttcagaggccatcttgtccgaggtcagcttcacctgcaatgcagtctggctcaacaaggcctacaacaatgaaactcacgcctatctgttcaacgtacctccttcaatccacggtcaggatatcgcatacacatactacaacggtaacggctcagcaagctctaccgtaaccaatgttcccgtcgccatcgccatgcaagagtacatcaccgaattcgcaaagaccggtaaccctaatttgagaggtgctcctttcttccccatgtatggaagcaatgccaccgtgctggctctgggacccagaaacattggaccgatgagagatcctgctgccagtgctagatgcgcttggtggcagaagggtctgttctattag

SEQ ID NO: 2513 - DNA, 1695 bp, Aureobasidium pullulans
atgcggtctgttctccttactcttacggctgttactgctgctttggcagcacctctcgacgagaaacgtgccattggtccttctgcagtcgtcaagaacggaacagtcattggcagcactctggggaatgtcgattccttcaagggcatcccatttgcccttcctcctaccggtagtcttcgattgaagccacctcagtcgattaccgcagcctatccctcaggaacattcgcagccactggcgtacctaaagcatgccctcagttcttcagccaggtcgacagctccgatatcccttctgacgttctcggagagcttctcatgtcacctttgctacaggtggctaccaataccggcgaggattgcctgactctcaacgtgcaacgtccggctggcactacatcatccagcaaactgccagtagtcttctggatctttggcggtggtttcgaggtgggatccactcagatgtacgatggaactcctctcgtctccgaatctgccactctaggccaccctgtcatctacgtcgctgtcaactaccgcgtgggaggcttcggctggctcgctggaaaggagctacaagctgatggatccaccaacctcggactcagagatcaaagaaaaggcctcgagtgggtggctgaaaacattgctgcgtttggtggtgatccggacaaggtcacaatttggggcgaatcagctggcgccatctcagtctacgaccagatgatcatcaatggtggcgacaacacgtacaatggcaaggcactattccgaggagctatcatgaactcgggatctatcgtgccagctgtcgaagtttcacacccaaaggctcaggcggtgtacgacctcgtagttaacgcagctggctgctctggtagcagcgatacgcttgaatgcctgagaaccatcgactatgagacatttatgagagctgcagactcggtccctgggcttttcagctaccaaagcatagcattggcataccttcctcgcccggacccctcaagctccttcttcccagtttctcccgaggtcgcgaaccagaacggcaattatgccaaggtgcccatgatcgctggagaccaagaagacgaaggccctctgttcagtctggtccagagcaacatcacaacggatgcgcaattgctcgactacgttgcaagcgccttccccgatacaccaagatcggttgtcgctgctaatgtggccacttatcctaacaatcccagtgctggctcgcctttcagaactggtatcttcaacaacatctacccgcagtacaagcgtctggccgcccttttcggagatgccgtcttcaatcttcgtcgtcgtcaacttctctacactgcctcatctgtcgtccctatgtggagttacctcgacagccatctctacggcactgcagtcttgggaactttccacggtagtgatttgctcgccatcttcttcggtactggtggtgttaccactcagaagacctacctcgactactacacctccttcatcaactatctcgacccgaatgctattggtagtggtgctcctctgatctcttggcctcagtacaacactacgaagcctacgcttttacagttgcaggcggttggcaacaatcttttgcctgatacctaccgcagtgctagtttccagactttgcaggcgaatgttggttctttccgtacttag

SEQ ID NO: 2514 - DNA, 1224 bp, Aureobasidium pullulans
atgcgctttcttctgatatctctcctgagcgcgctatctgtcgtcacacacgcattaccggctcaacaggtccccctccttcgacatgctgcaaacaatcgtacagtttctcccgagctcttctctgatctcgaagagttggctcgcgttgtcgacatctcttattgtgtaggccttaccggtataggcatatcgaaaccgttcaaatgtctcagccgatgctcagagttcccagagttcgaacttgtcaagacatggaataccggccagttgatgtccgattcgtgcggctacatcgccctttctcattctcagacaaaccctcgcatcatcgtcgcattccgcggtacctactcaatcgcaaacacagttgtcgacctttccacagtgcctcaagaatatgctccttaccctggcgacccggattcagacaccaccggcgacgatgaggcagggactccacgatgcaacaactgcactgtacacactggcttctacagctcttggaaagtggcttcatctgccgttctgccagatttggaagcagcaatcgcagcttacccggactatgccttgacgcttgtaggtcactcactgggaggagcagtcgctgcacttgcaggtctggagtttgtttcgcgtggctggaatcctaccgtcaccactttcggcgaaccgaggctcggaaacacagctctgaaccactatctcgaccagcgattcaatctgcttgactcgacccgcgaagtctggactgacattgtcgacgaacgacaactgcgctatcgtcgtgtaacccatgttgacgacccggtgcctctactaccccttacagagtggggttaccgaatgcatgctggcgagatctacatctccaagtctgccttgacaccagacgtacgggatctccaacactgtgcgggcgatgaagaccaccagtgcattgccggacaggatggtagtctgtccacagaatcaatcctcaccaaacgcagcgacctcagagctcaggtcaaacgctcgatcgatgatcttaccgaggagtacgagctggagaagagagacatcggctcatgggttgtgccatctcgctataagttgtggcagttgttcttctctcatcgcgattacttctggcgccttggcctttgtgttccgggcggcgacccctgggactggaatcgcaggccgtatgcaccactcgatgatgaggaccaacactaa

SEQ ID NO: 2515 - DNA, 306 bp, Aureobasidium pullulans
atgaaggtcttcgccagcattctcgccatcgccgccattgcctctgcagccgcaactcccgacgtgaagcgtcgcagcgcagtcctcgcaagccgcgatgcctcagacctctgtggtccccttgacacacccatgtgctgcggtaccgacgtccttggtctcgccgacctgtcatgctcttccgtccccagcgatgtcacaaccacagatgacttcactgcctactgcggcgccgagggcctatcttctcactgctgtgttacttctctgcttggcagtctcggtgtcgcatgcgccgccgcttga

SEQ ID NO: 2516 - DNA, 2280 bp, Aureobasidium pullulans
atgcgctcgttcttcctgctgtccgctgctgcggcactcactctcgcttctcctgttcctcaggagcttgacttcgaccttgtcgatgttgttgagactccctcgaacgttaccatccctaccaacaccgatgagcttatcgtcagctacgactccgatgctgctgctgccgctgtccagacttccgttctgaccggtcagactgagatcgacatctccaacagcactaccaacagcaccagctcttccactcttcgcagacgtggtacctgtgccgttcaggccagcggctccggccctgtcccttctcccgacactgcttcggctttcctctcttactctgcctttgccagcgctgcatccggtgccgccactccttccggctacactcaggctttcaagaacttgaatgcctcgagcaacgcttatggatacctcggtttcaccaacctcgcctcgtacgacaccgccaagtgtgcccagaagtgtaacgccatctctggctgtgcttccttcaacctttactacgaacgtgaccccagcaaggaccccggtactggctgtgagaaccctgcctcgacaaccaacatcaagtgcgtattctggggtggagacctcactactacaaacgcaaacaacgctggtcagtaccgtagcagcttccaggtcgttattgccggaagcaacggttacgtgaacaacaccatcgagcccgctgatggctacacctctccttcttactacggcaacaccgctatcgacgcccctgttgactgcaatggccagtccaccttccttggaagcaaggtcttcaccggtggtcctttcgatgccagcctttgcgctgctgcttgcgacgcccagagtgccaccaacctgaaggccaacaaggccacttgcaagttcttcaacacttacattcttgctcgcaacaacgtcgccattggccaatactgcaacctttactcccagacttgggcatcgtcttacgctacctacaaaggttccaacagcggtggtaacaagtacaccgtttcttactcttacggtttctccagctctgccgacgctggtacttgcaagaagccctctacttctacctggatcatcagctctgccactgccactgccagctctactgctactgctcagcccaccactgctggtggtttcatcaactggaagactttccaggccaacggtgccaacctcggtggctggctcgagaaggaacagacccacgaccccatctggtgggccagcgtcgccaacctttctaccacccctgacgagtggactctctgccagacccttggcgaccagtgtggtcctactttggaagccagatacgagtcattcttgaacaagtctaccatcgatcaactcgcctccgtcggtgtcaacactctccgtattcctaccacttacgccgcctgggtcaacgttcctggatctgctctctaccacggtaaccagcagcagtacctcaaggctattactgattacgccatcaacacctacggcatgcacatcatcgttggtcttcactccctccccggtggtgtcaacaacctcgacattggtgaggctctcatgcacgacgacttcttctacaacaccaccaacctcaactacgcttacgccgccgttgactccatccttgacttcatcaaggccagcggtaacctgacttcctggaccatcggccccatcaacgaggcctctgacaacctctctggcttcggtacctccgccggtctctccgacaagggtgctcagtgggttgctgactacatcaacggtgttgtcgctcgcaccgccaaggtcgacagccgtatccccgtcatggtccaggactgcttcaagggtgctgccttctgggagccttacttcgacgcatctgccaaccttgtcatcgactcgcacgtttactacttcgctgccgccggtacctactcgcaatatgttgcccctgccgtctgcggtcaggctgccttcatcgccgaggccaccaaattccccaacttcattggcgaatggtccctccagaccatgtacaacaacagcctcgccatttctgagagacagttgatcttcaacacccagcgttacgcctggagcaagtacgtcagcggtggttccttctggactgctgtttcgtactccactgctctcgtcgatggtcagggcactcagagagattactggtcctacaccgacctcatcagcgctggcgtcataaaatcagagtctgccttcaacggcaccgcttactgctag

SEQ ID NO: 2517 - DNA, 1695 bp, Aureobasidium pullulans
atgcatccctcttggtctttgctaccgctcgtggcctctgtcgcctcagccgccccttctctactacgccgggcacctgttggagcacctgtcgtcaacctgaagaatggttcatactatggtgtacacaacagccaatacaaccaggacttcttccttggtgtccctttcgcacagcctccgattgagcaacttcgtttcgccaaccccgagacactgaatctttcctggactggtgctcttccggcgacaaactatgcctttgaatgcattggttacggcggtgatcagattggctatcaacaaagcgaggactgcctctaccttaatgtcgtccgaccttctggctacgagaaccagagcctacctatggtagtctggatccacggtggtggattttatatgggtggagcagttgatcgtagatacaacctgaccttcctggtcgagaactctgtcaagattggtaaaccgatcatggccgccagcatcgcctacagacttggacctttcggattcctcaacggcgacgaagttgctggtgctggtcagaccaacatcggtctcaaggaccagcgtctagctttgcactggcttcaagagaacggtgctgctttcggtgctgatcctaagaaggtcacgatcatgggtgaatctgccggagctgcttccgttggtttccagctgactgcgttcaacggacgtgacgacaagctcttccgtggtgcaatcatggagtctggaaacccaatcgcctatggtgctctgaacacctctgctgaataccagcccaagtacgccgccctcaccaaggcagccggttgtggaaatgccactagcactctggattgtcttcgtgccctgccactgttcgttcttaacaacatcctgaacaccaccgagttcaacagccgctggaaccctgctctcgatggcgacttcatcgctcgctacggtagcgagcaactcgcagagggagctttcgtccacgtccccatcatcgacggcgccaacagcgacgaaggtgtttcattcagccccaacggaatcaacagcaccgccgacctcgaagtctacctcaacaccaccagcaacacacaatggggcctgactcccgacctcgtcgatgacttactccgcgtctacacttccggcgcccaagactacctcatcccctcaaccgaagaactaggccaaaacgtcacttccctcggcccagcctacggcccctactaccgcgcctcagccgcctacttcggcgacgaagtcttcatcgccaaccgccgcaagacctgcgaaacctgggccgccaacaacgtatccgcctactcctaccgcttcaacgccatccccaccggctccgactacgtcgcacatttccaagaagtggcctttgtgttcaacaacctcgaaggcttgggctacgccatccctccctttgcaaacaaatcttccgcctttaccgaactttctgatttcatgagcaagagttgggtcacttttgtgcatgatttggatcctaatgggtttgacaagggggtcaattcgagtttgcccgcttggccggtgtatagtgttgataagccgcagaatatggtgtttgatgctaatgtaaccagttatgctgagcctgatacttggagagctgagggcatcaagttgatcagcgataataatgttcagtatcatagatag

SEQ ID NO: 2518 - DNA, 2664 bp, Aureobasidium pullulans
atgttgttcaacatcgtcactcttttggctcttgccccttctgttctttccgcagtcaccgataatggtgccaagagacgcaatgttgtccctggtggatacattgtggaattcgaggatgtcatgtccattgcttctgataccaaatctagcttctacaagtcgctctctgacaaaaacatggaccctactcaccgcatggacctttcctcttctcttttcaaaggactttcgttccacgttgataccggccttgaccaagcagtagtcgcacaagatatccaagccatgccccttgtgcgcaaggtctggcctatttcgttatacgacacacaagactttgcaactgctccttacaccaatggatcgaactctacttcgtcttcagacacattctctacccatctcatgggtcacgtcgacagattgcatgccgagggcttgaccggaaatggcacctttgttgccgtcatcgatactggtattgattacctccatccggctcttggtggttgtttcggccctggatgtaaggttgcttatggctatgacttcgttggtgacgactatgatggtacgaacacacctgtgccagactctgatccatactcggcttgcaacgagcatgggacacacgttgccggtatcgttgcagctggtcctaacccttacaacttcaccggtgttgcgcccgatgcgactcttggtgcttacagagtttttggatgctccggaagctctggtgatgatgttttgattgacgccttcactcgtgcttatgaggatggtgctgatatcatcactgccagtattggtggtcctaacggttggactgaggaaccctggacggttgtcgtctctcgcatcgttgcagctggaactccttgcactctcgctgctggtaacgacggttctgaaggtctgttttacggttcgtccgctgcagatggtattggtgtcattgctgtaggatctattgacaacatcgaatcgcctgtcttcaccacctacggtacatacaggatcgataactcaaccactggcgagttcggctatctcgaggccgctattgggatgcccaacatcagtctccctctctgggccgttagcaaggacagtgctattgttgatgatgcttgcgaacctcttcccgccgacacccctgatcttgctggcaagctcgtactgattcgccgtggcacttgcactttcgacaccaaggctgctaacgtcgctgcttttggagcacagtacattatgttctacaacaatgccccaagtctcacatctgctagcgtttcataccctggcatccttggagctgctatggtctccgccgagcaaggtgcttcttgggccgcatctcttgctactgggtctgccattcaggtcactatcactggtgatttgaccgtcttctctagtccgcccaacaacattactggcggccatatgagcaccttctccatgtggaaccctactaacgaagcttacgtcaagcccgagatctctgcccctggtggtaatattctatccaccctccctctctcacaaggtggttacggagtcctgtcaggtacttccatggccactcctttcgttgctggtgttgttgccctcatgacacaggcacgtcctggccttgatccttacactattcgtgctatcctcggcaccactggccatcctgttaccttcaacgacgggaggactacttatgattaccttgcccctgttgttcagcagggtggcggtgaagtcgacgcctttgctgcggttcacacttctaccgtgatcgatgttgccaaccttgcattcaacgacacagcacacttcgtcaaggaggcaaatttcaccataaccaaccgtggtaccagcgagatcacctacgactttgcgtatgtcaacgccgccactgcatacactcttccagatgatggtagcacccagcctcagaccttccccccggaccttgtcacctctggtgcaagcgtaagcttcagcgctggtagtgtcagtgtcgcagccggaaagtcggagactgttcttgtcactcttgccttgccccaagatcttgcaaccgctcgcatccctgtctactcaggtttcatcactatcaacggcaccaacggcgattctttgaaccttccatacgctggcattgcttcctcgctcaaggatgctactgttcttgacgccagcactggatacccatacatcaccagcacctcagataacacctacgtccctctagatgccaacactgtcttcactatctctgttgcgaacactacaatcaacggcactaccgacaactcgactggtcttctgatacccaatctgagaattggcctcgtcatgccctcttctcttattcgtgctgatctcatcccctcgaacattacgtacggtacatacaccaacactactaccgttcttggtgtcaaaactcttggtgccattgccggtacaccttctgtttaccagcccagagccaacgcctggagtaccgccttttacggtgtcctcgatgatggcagaagagtccctgcaggaacctactcaatcctcgtccgcgctttgagaatcttcggtgacgccacaaatcccgatgactacgacagtgctgagactgtaccattcacgatcaagtatgtgcattga

SEQ ID NO: 2519 - DNA, 1449 bp, Aureobasidium pullulans
atgaagcttctcaagaccttcacctttttgcccttgctttgcttcggagtagaagccacggagcatcatggtacagtcgaactttctctcatgaacagtgtcggtaacaaatatggcgacgaatactatgtcaacctcactgtcggcactcctggccagctacagtcggttttgatcgacactggaagcagtagcaccatatttctggcctcagatgtgcctggctgcaacaaacccctctgcccacagactttcaatctgtccgcatcgtcatctttcgatgcagtcagtccgggagccctgtacgcaccctttggtggtgctgccgcactgggagattttgtcactgatgtggtccagattggcgatctctccattagtaaagtcccgctgggactcgcccacacttttcgatcacgtctccagccctatactggcatcctgggccttgggtactcgagtcgtgaggctatcaaccggacgatgtcacataaagtgccaaagcatccttcctttatcgaagtgctcaccaaagccaacgccatatcttcacgtcttttcagcgtccacctcaacaaactggatatgtatggctcaatactgtttggaggtattgataccgcaaagtatgagggcccactaactacactcaactgtctgaatagcaaacacgacgaagttgatcagtggtacctgaatctacaagaagtcactatgcagccccatgacggcccagagcttaccttactccgttcgactcaggacgaaccacgattcgccctagtagatacggggtctccagactggcagctaccatcaagtgcgtatcacaaggttcttggatttgcaggagccgaagctccggacggcctttggcctctacccggcttcaacaggccctgccgtcaagtggcgtacggagccgcaaacacgacgcacttccagctcacttttgctggcaatgggaccaatactgccacgctggatctcgagctagctgatctcttcacaccaatcactggagatgatggtagcgctacggtagaccgttatggccaaccgttgtgtatgttacgaatcgtagaagtggaggagaataatgagcctctgattataagcagtagtgtcatgagggctggatattgggtattcgacctcgacaatgggcagatatccctgggacaatctgaccttgagacgacttcatcaaacgtagtccaggttcaagctggcacagatggtctcagtagagcggtccaacggctcgttcccgagtctcaattgaatgatgtggagggtcaaatggccctcccatcgacctacaaattatcaaccgctacgaacaccatcggctacactactggcgcacaattttacccaagttcggcggctagacgctctggtgaaaatacaatgcggctggaaacacaacgaagaccgacgaagtaa

SEQ ID NO: 2520 - DNA, 1275 bp, Aureobasidium pullulans; identical to SEQ ID NO: 2133

SEQ ID NO: 2521 - DNA, 2106 bp, Aureobasidium pullulans; identical to SEQ ID NO: 2134

SEQ ID NO: 2522 - DNA, 4641 bp, Aureobasidium pullulans
atgcggcaaacttttcaaatttttgtgctgctgggttttgttgcgaattccttcgcttcgtcttctagccattttgctccatatgctagtgtgctcaatcatacctcgcaattgaagaaaagctacgattacattgtcattggtggaggaacaagtggtctggtcgtcgccaaccgcctcacagaaaacccgaacatcactgttctagtcatcgaatatggctatgtcgacggtcaagaaaacggaacaacggtgccaggtcttcctgtcccaagcaaataccttcgcacagataccagtatccctcaacctggtttgaacaaccgcacttctccgttgtatactggtgccgtggtaggcggtggtacggtggtgaatggaatgttctttgctcgtggatctgctggtgattatgatgcttgggaacagctgggtaacccaggatggggatgggaaggactgttgccttatttcaaaaagagcgagactttcacaccaccgacagaggaattgcaagacatgtttcccggcgtcatctcctcagatctttctccccatggaatcgacggccccgtaggctcaagtttctccaactaccaatacccagtaatcaaaaacttcttcgccggttggaacagcataggcgtatccacaaaccctcaaccaaacaacggcaaagcgatcggtgctttctacagcacaatctccgcatacgcagaaaatcaatccagatctacggcttcggatgcttattatcgacctattgctggtgtgagggggaatttccacttgcttactggatgtcttgttgcgaaagttaattttagtaagggtaggagggctgtgggtgttgattttatttctcgcgagacgaataagactagtacggtgaaagcggctcgcgaggttattcttgcggctggagctgtaaggagtccgcagatactgcaactttctggtgttggacctaggaagctgttggagagtcttgggattgaatgtgtggttgatttgccaggtgtaggaagaaattttcaggatcaacctacgatttatatgcaatttagctatggcaactacacattcccaacaccagactggatgttctcgaatgccagctgggcggctgagcaactggacatctacaacaagaaccgcacgggtccaatcaccatcccctacctaggaggcagctccgtcgccttcctccccctcaaaaacataactccctcctacccttccatcctcgccaccacagcactcacaaacctctcctccatcttcccctccacaattcacccttccatcctcacaggctataaagcccaacatgatctcctcctctctctatacgcctcccccgacgccgcagtagcggaaatcgcctgggaaggcggcaacactatccctctcgccatgatccggcccttttcccgcggtgcgatagaaataacaaccaccgaccccttccacccccctaccatcgatttcgggactttcagccatccgactgatatactgacatccatcgcctcgatccgcaaactccgcgaatggatctcttcaccagccatgcaagccctgggcgcagtcgaaacctttccaggcgccagcgtttccacagatgcggagatagaggcggcaatcaggaatgcagcgacgagttcgtggcaacatcctagtagcagttgtgctatgatgaagaaaaggtggggaggggttgtggatgctgaggttagggtgcatggggtcaaggggttgagggttgtggacgcgagtgtttttcctatggctgtggcggggcatacgagtagtagtgtttatgctgttgctgagaaggctgctgatattatcaaattgagttgggaaacctttttgaccacggtctacagcacaaccacgtctgtcagcctatccatctcaacgcaacctgcttccacatttacgacaacacagagcctgactcttactgcgacagccactgcaacatcgttgagtttgagtctgagaccagcttctacagtggtgcaaatctcgacgacgacggcctactcttacataaccaccaccagctaccctgttgcctcaactgtgacgactaccagctacgctccacaaacaactgtgtatgctcctccgtcgacgataaccgttactgtgtcgaacagaggagcggcaacatcttctgccactccatcctttgctttcacaaccagagacttctgtcccgcgattgatgaccaagatatcgccagctcaaacggtactccgtatactatgcactgtgcctcagacaccaatataggatcatttgctgatgctcgagccggatatggatacggcgattgtctcgatgcctgcgatcgcacacctcgctgcgtagccttcacttatgttggatccagttcggggcaggcatcggggacgtgttatatgaaagatcaggtgggtctggtacaagcaaacgccggcagcaccatcgttggtgttaagaaagtcgtatctgctccttcttccgcagctgcgagttcaagttcggtcgccccacctctccagacagctcccgtccaggaagattattcatgcccggaaaatgatcgacagcgagtcatcgataattatggcggtgtgtatacgctcgcctgtagcagcgacacttctggaggtggagcttttgctggcgactctccggacttcaatggctgcttcgaaaagtgcgacagcatggtgaattgcgttggcttcacctatgatggtaacaactgctatctcaagacgggggcagcaaattccatcagttttgtgcctgcagcttcgaatttcgtcggtgcgatcagaaatatgccctcggatggcaattcgtatagcgtgactccgagcagcacacctccgcagactactactgtttggttctgcaagactgaagctgacatactttgtgagtacacggacaaccacgcaggtgatttatccagccaccccagcgcccgtgacttcgtattcgaccataacatcaactgtcacctcgactgctacgccgcctccagcgagcacgagcatcataactacgacattcacgagttatgcagcaacaccgtctccagtcacaatcgtctccacaaccacttcgacgatttatgctgcaacaccctcgccgctgacctcgactgtctatgctgcaacaccctcgccgctgacctcgactgtctatgcagcgacaccctcaccgctgacttcgactgtttatgcggcaacaccctcgccatccaccttgacagtctatgcagctactccatctccctcaactcagaccacgacctccacagtctatgctgcaacaccatctccagtcacagtcatctcaacgaccacttcgacgatttccgtttatgcagccaccccagttccctcaacctcaactcagactaccacaatagtgagctcgttcacagcgacacagacgactactgctccagcaccgcctcccaatactgtgactgcgacgaccactgctccagcgccgcctcccaatactgtaactgcgacgagcacaatctatggcccaactccagcaccaataacttcaactcagaccttgactaccacaagtactacaactcaagtggtcactgtgacatcgacaccgccggctgtgacgaccactgcgcccgcacctcctgccagcactgtaacaactactgcaccagcacctccagcaagtactgtgacggttacggtgacaccatcctctattacgagcgtgacagctgcaagtccagcagcgcaaggagcaactactggctcccgaacaacgacaccagtgcagctcccacagtcgctctatcgtcccctactacaatcataagctcagctgcaaaccatgacgacggaatcgttgcccgtgtcgtgcccttcgcaatttccatctgcggcttctcctccaacaatctcaccataagcaccaatggtgttctcggctttggcataactagttcctaccagcctgccgctcttccacaatacacagctctctcccccaccggctacgccgtcataccattctgggccgatctctacattgctcaaggaacatcccaaggaatctactatcaagttgatggtacagcgggctcacggattatgacttttgaatactacgcgacatactacaacaagacatccaactattatcatttccagattctgttctacgaaaacaacccaaaatctttcacattcaagtatttgaatgttacggacaacggagtcaatgccgtggttgggtatcaatgtcaaccaaactccaaattcaagcagtactcggccaaacaagctatcatcaccggaggtttacaagtggactacagttatagcgcagacactttcacctctggtagagtgccaagtcgagttgcaatgattggcctaatgattgatttcgttaatcgcattgtcgacaatgtgtcgagttcatggcgagcagcgacctcttggatgcgggataacccttcgagtacgccgtcgaacgaggtctacgccccaaagccgtcagtgacctttgaggccaacattgaggatagcatcaaccggaggtgggcaggtgggtatagccgccgtgagaactcctcaaccttggcctag

SEQ ID NO: 2523 - DNA, 1998 bp, Aureobasidium pullulans
atgcgtctgtcgacttttctattgctggcagcagccacggcggccgttgcccagaataccacccaagtctacgattatgccattgcaggcgccggtactgctggtctacttctcgccatcgtcctgaccgaagatccttcgatcaatgtcgcggtcctcgaagctggctcggatggtcgcacgaaccctaatatcacgattccggagttgagaggcgagatcattgataccgagtatgattgggcgtactacagtactgtacagcctggcttgtatgagaacaggagtcaggctgtcaatagaggaaagaccatcggtggaacaagcgctatgaattggatgattcataacgaagactcgcgtatacaacttgatatctgggagtcattgctcaacctcactagctggaacagtgatgcatcactgggctggaattgggagacactatccaccgctttccgcgagagtgaggtcttcttcgctccttcctccaatgcatcttcggcggagcaaccggaccctaccaaccacgggtcttccggatacatctgctcgaccttgcaacgcagtgtcctatctctgctgtccgactacgtaactcctgctcttctcaacgctggatatgctgtccccggtgatagaaatggaggtaatgtgactggtgccgggttacttcctcttgctatctgccccggcaactacaccagaagttattcgggatcagcatatactgctgtccaggacagacgcaacttgcatctttataccaacgctcaagtcacgaacatcagctggatctccaccacaactggaaatgttactgcccgtggactcaattacgtcgacacttctggccgtacttcaaacactagtctctcaatccaagcgcaggagattatcttgtctgcaggtatagccggctcagcacctatcttggagcgatcgggcattggtaacccggacattttgacaccgttgaatatcacacccatagtcaatctcagcagtgtaggcactggactccgagatccattgatgatgcaataccagcctctccaatacaacttcagcgttgagttcacaggtggcgagtatgctcagaactacattgacctgcgtcctgctcaagatgtcctgtcacctgccgactataatgctgcctctgtctggttgaatgagacgacatctattccgggcttggaagatgcacaacttcttgttttcaagcatctttggtttgcccgccaacctctgattgaaatggcatggcagtacagcagcacgcaatccatgccatacaccctaatccctctctcccaaggaaccgttcacatcaatacctccgaccctctagccgctcccgtcatcgaccctaattataattcagtgactgcgatcataaacaatgagacagtaccctgggatctctggctcctctcccgagcttcacagttctacgtcacacaactggcaaacagtcctcctttctcagacgtcttgaccaaaacagaccccgaccacaacctgtcacctgccgattaccaacaagccgtctacgaacgcacaggcacatctcaacatctcacaggcggcctacccatgcttcctcgttccgctggcggtgcgatcgcctccgaccttctcgtctacggcactcaaaacgtcagagtcgtggatggcagtatcttcccgtaccaaccttctgcacatcccatgggattgacatatgcggttgctgtacacgcggcgaaaatactccagcgagctagagggaccaagttgacatatactgaactgcctggagtcagcaactcgagctcgaatgctacggctgtattcccgacgaacctgccgactgcgacttatgatgttagaggtagtgctgtgcctgctagctcttcggtggtggtttctaccggcggagtcgagaaggtggaaacaaatggctgggtcatgggcatcagcatgatggtctttggttggaacgtactgatgtag

SEQ ID NO: 2524 - DNA, 1068 bp, Aureobasidium pullulans
atgaaggtcactctttctcagctcattgctttggcaactactgccagctgcactgtcatcgatctcgacaagagagcttctccgctcgatgtcaccttgactcctctcggaaacaccaaggtcaaggctgctgtaaccaacaacggtgatgtcagctacaacctcttctacaagggaaccttcctggacgaggcccccgtcgacaaactccacgtcacctctgctgctgccaaggctcccttcactggtattctgcagcgtcttgctactactcaactcaccgaggagtctttcaagcccctcatggctggtcagactattgaagtcgaagtcgagctcgccgaactctacgagctttccaccagtggagcatacagtgtccttgctgccggttctgtcccctacgccgagctgaactcgactgttctgtctggaagtgccctctctttctcgagtaacacactttccgtcgatgttgacgctgccgaggctgccaaggttgaattcgccgtcagcaagctcgagaagcgtaccgccatccaaagcgattgcaccggtaccaagttgaccgccatccgctctgctttgagcaactgcaacagactggcaactgctgccgcaactgccgcaacttctggctctgctagcaagttccaggagtacttcaagaccacctcgtctaccactcgcaacactgttgctgctcgtctcagagctgttgcttctgactgtgcttctaccaccggcggcaagactcgcacttactgcactgacatctacggtggctgctcatctggtgttcttgcttacactctcccctccaacaactacatcgcctactgcccccttttcttcagcgatcttcccggcctgaccggctcctgccacgctcaggaccaggccaccaccgtcctccacgaggagacccacgcccctggtgtctacagccccggcactgaggacaacggttacggctacagcgccgctacctccctctccagctcccgcgctgttcttaacgctgattcctacgctctttacgctaacgcaatctactctggatgctag

SEQ ID NO: 2525 - DNA, 2274 bp, Aureobasidium pullulans
atgcgatctttcttcttgctttccaccgctgcggcgctggccttcgccactccagtgccccagcaactggatctcagcatggccgatgctattcctacacctgagaatgtcaccgtcccttctgacgtctcgtcacagactgtggagtttgatatcgatgccgctctggaagacgcaatcgtcgcagtactcactgacgacaacaccattgacgtctcggacagcaccgctgacccggtcaacggtactactcctatccaaaagcgtgcggcttgctccactgtcgcacttggatctggacctactccaagccccgatactgcagccgatttcttgaagctcgccagcatctccactgccgccaatggcgccagcgctccgtccggctacaccgagtctttcaagaacgtgaaggcagctgccaatgcttatggttatcttggatttaccacgctcacttcttacaacgtccaatcctgtgccgataagtgcgacaagatcaatggctgcaactccatcaacatctatttcgagagagatcctcagaccgacccaggcaacgccgagtgcaagaacaacaaccccgccagcactacaaacataaagtgcattttttggggtggtcctgttaccacagagaactcggtcaacgctggtcaatggcgcagcaagtttcaagtcgtcatcgctggtgccaatggctatgtgaagaatagtatcgccactcccacaggatactcttcatcagcgtattacggagctgcctccatcgacgctccgaaggactgcaacggacaaagcactttcatcacctcgaaggtctttacaggctctccttttgacgctagactctgcgctgctgcctgcgatgctcagaacatcgaccatgccaaaacaggtgcacaacaatgccgctacttcaacacctatattctgtctcgtaacaacgttgctctcggccaatactgtaacctctttactcaagcttggactgcttctcaggccacttacaagggcatcaccagcggcgcaaacaagtacaccatttcttacagttttggtgtctccgcttcgtccgatgctggcaactgtaataaggaatcttctccgccaaccagtgatactggcaagccgcctgtgactggcccatcgactggtgctgatgcgttcatcaactggaagaccttcaaggccaatggcgtcaacctgggtagctggttggagaaggaaaagaaccatgacacattctggtggaacagtatcaacgacgacccttcgatcatggacgaatggagcttgtgtgcctcacttggtgctcagtgcggacctgttttcgaggctcgttacggatcgtacgttaccaaagctgatattgacaagttgggagccgtcggtgtcaacaccttgagaattccaaccacatatgccgcctgggttaaggtacccggatctcagttatactctggtcaacagaaaacatacctcaaggcaatcacagattatgctatcaagacctacggcatgcacgtcatcatcggactgcactctcttcctggcggcatcaacaacctcgacatcggcgaagctttcttccacaaagaatggttctacaacgagaccaatcttgcctactcctaccaagctatcgatggcattctcgacttcatcaaagcctcaggaaatctcaccgcatggacaatcgcccctatcaacgaggccggcgatgatctctccaaattcggtggccccaacactctttcgaccgcggcagccgactggacaggcaagtacctcaacggatgccttgatcacatcgccaagctcgacaaacgcatccccatgatggtgcaagatagtttcatgacacccggcgcgtggtacaaatactttgacgcctctgccaacgtcgtcatcgacacccacgtctacttcttcgccgtcgccggtgcctactcccaatacacacccggcgctgtatgcggacaggccaagtggatctccaactttgacaaattccccaactttgttggcgagtggtcgttgcaaattcgcttcaacaacaccttttctgaccgtgagaacaactttaacgtacagaggtttgcttttgacaagtatgcttctggcggcgctttctggaatgtacattcgcacagtgctgcggctgtcagtggagagggcacgcagagagattattggtcgtatgttgatctgattgatcagggagtcgtaaagactattgatacttcttatgcaggttgtgatgctctctga

SEQ ID NO: 2526 - DNA, 4743 bp, Aureobasidium pullulans
atgccgcctacggcatcacgatccagaatgggggttctgcctctctttgctctcttctcctccgctctagctcagagtataccaggtgcaagctacttcactggtggtggtgtccctggctctggagcataccagctggttgatgactaccagcccagtgtgtttttcagcaaattcaattattacaattcttacgatcctacctatggtcatgtccaatacgtaaatgagaccgtcgccaacagaaatggctacacgacaacagatgatgacaacatcacgatcagcgtcgacaccacgaacaaatggccgagaggtggccctggaagacccgccgttagactcatcagtgacaacacctacactcatggcctcttcattctggacctcaatcatatgccctttggttgtggaacatggccagctttctggcttcttggaccggactggccacgcaatggtgaaatagatatcattgagggtatacacaccagtactacgaacaccatatccatgcacacagactcgaattgtacaatcgctgggtcaggacagaccgggttgttcacaagctccaactgcgatcatgcggcgaacgacaactctggatgtgggagtgtggcaaacaacactgctactcctaacaactatggtaaagcacttagtgacaataacggcggtgtttacatcaccgaatggacttcagcatatgttcgtgtttggttcttccctcgcaacaatataccttcaagtgtcacaagcggttctcctaacattactcaattcggattacccatggcaaatttccaaggctcttgcaatattgattcccatttcgccaatcacagcatcatcatcaatactgatttctgtggtgcttgggccgggttcacgtattcgaactacaaagaatgtccattgacgactggcttgaatggctatgattcttgtgtcgactatgttggcaataacccacaggctttcttggacgcctattgggaaattaattcgctcaaagtctatcagctaccggtcaacgtggattcgtctactgttcgtaccagcacggcgccactgacatcctcttcgcctatcagtgccagtaatagtatcatcaatcctggcatgggtcaatccacatcttctctacctctttctgtaccctacagcggaccactttcttctgcttcttctacaagctcgtcctcggccactgcctcggctaccccaatcgtatgcccattgtacggcaacagaccttggacggactataaaggagtatcatatactatcagctgcggatctgacttcactgcccaaagtctgaaccaggacgggcagacagttgacagctttgaagcttgtatcgagctttgtgatggagttgatggttgcagtggagtctcccatcttggaggcaatggagctggaacttgtgtactgaagacaggcaccggcgatcttgtctacgatggtcatacttttgctgcggtggcgatctcaggcaaatccagcggctcctcgacaacattgtctacgacgtcgacaggctctataccatccacaccacccaagactgccacacttcgccctactgctcagccatcgacttgcccagaagccaataacgccgtgtacgtcgacgagaatgtcatcaactacaacgtgtattgctctgcagatactgagattggctccttcaattctaccgatatccatggcggcggtttcacggcttgcttcaccatttgcgatgttacgccggattgtgtcggattcacctttgtcggtgcgtcatcgggcacttgttatttcaagaaccaattcggtggaactttgtcggctccttccaacttcgttgtcgcttttctcgctcagggtcaaacttcaggtagctcatccttggctcctaaaacttcatcggtggttctttcgagtgttgcatccgttccctctccttatagcagcacgatctccatttcaacacgcagtagtgtattgtctgtcggaagctcgcttgtcagctcgagtctccttgctagcacgacgagtgtttcgtcatctccgtcatcgtctctggcaacatcactgtcttcttcgcggtcatttgcatcctcttcaatacgggcctcgtcttcacggccactggagtctttgacatcttcgtcttctaccttgcagtcgtcggcgtctctgacatccttgacctcttcatcagttccatcatcagcatccagctcgcagtggacgacttcttccgcgattcctcaaatcgtctactatgtcgccccaccgtgtccttcgaccgcagacaacatctgcaactccgatacaccaacgacgtgttcgaacgctcgaggggcaaatttcaatgttggatgcggaaactcctacactggaacgacgatcgacagcaacgatgggattaacagattccgcatcatgaagcgtgttaccgagccttcgtacacagattgtcttgatctttgtgacgacacggatgggtgtgtgggagtcaactacaaaggtgatgagtgtactctgttcagtcaaatcactggcactatctctgacccaggaaacatcgccgccacactcttaccgccagtgccagtcacttcgacggaagctgctacatcgacaccgactgcctctgctcttccaacttccagctctgcctccgcatcactgccatcgatgtctgtgacttcctcgagcgtgacgtctagcacttcgttcacagcgattccgtctgcttctagcctgacgtgtcctgcatctgctgggcagaatgcaacagattcgaacggaacaaattataccatagcttgtggcttcagcgttcagggaggcgatcttgctagtccgttccgtgctgtctctgtcttagactgcttaccaagttgcgatattacggccggctgtattggtgtggcctacgacacgtcatcgtccttgtgtcagttgaagtcaaccttcagcggcactcgggtacccaatgcaaacttcatcatcgcggtacgggcaggcgcgactgatcctggtatttcgtccttatcaggtgcaacaagctcttccacaacatcggttcttagttcctcgagtatcatcgccagtagcactgctcctgttacaatcacgacctcttactctgcaagtgcaactgtcactgttgtcagtacatacattacgactggagttcctcccagcggcagtattgcaactggcagcgaaagcacaggatcgggctctttgtgtttcacttgtttcttgacgcctactgtgataacgggtggtggcagcttggagtctcctccagtaaagaccggtactggcagtgggagtgtatgctctgccccagcatctggctccgttgaaaccacaacggtcttcaccacggaaacagtcactgcttgccccactccaggcatgtgtccgccagaaggcttcggctggtacggtacattgtttggttccaacttcagtagtttcagtgtcgctcctcaaagctcttttgtctcgagttctttcacctctataagtggaagtataggacctgtcgcaagcgcgggatcaagcattcctccttctaccacaaaattcggcccgtctagcgctgtaccaagcggtggggcctcagcaactccgatttgtcctggctcaaacggtaagcttttcactgacagcctgggtcaagtctatgagatcggatgtgaaagatacgtcaccgaccagacagtgtcgacaacgaatgtgagctccctcgcgtcatgcattgatgcctgcgacatgtacaatctcatgagtttcaacgcccccagctcctgtctgggtgtttcattcttcacgaccctcagtatggataactgcgagctgaagaatggtttcattaacgtgactacacctggagttgattctgcacgcctcctctcgagatctgttggctcgggcaacggcacatcaggtaccggcggatctggaggcaatggcgactatggcgctggatcggcagttggcaccttcacagcgacagctaccagccccgacggctctggggctggaaatggtgctggaggaaccggaaatggctctggaagtggttcaggtggaacaggctctggtgggtctggtggttctggaggcactggaaatggttctggaaatggaccgaacactttaccaggaacccagccaaacacgttaccgggcactggtccaggaacaggcctaggaacaggcccaggaacgggtccaggaacgggtccaggaacggggccggggtctactgtttacggggtttcgactgctgtatcgacgtttgtttcgaacggacagactgtcgtttcgacatacggcgtcagcacagccatcagcgtggtttatcagcccactactcaaacagtgaccacgaccagtatctccatctcggtttcggtctccgagcgcacgatagtcagcaccgctccgggtgaaactgtctcagtaggtggaggcaccggaggtggaggaaatggtggtgtggttaccatcacagcaggaggtggtaactacatcactgttacgcaagtggtcacgagctatgcgcaaccaacgaagagcagttcatctttcacctgtaggacgtacgccacgaactacctcaatggtatgcatgggaggaagttggcgaaaagaagaagcgtgtttgacaagcatggtatgggctccggccctctggcaccaatgccgggagcagtaccatga

SEQ ID NO: 2527 - DNA, 909 bp, Aureobasidium pullulans; identical to SEQ ID NO: 2140

SEQ ID NO: 2528 - DNA, 1089 bp, Aureobasidium pullulans; identical to SEQ ID NO: 2141

SEQ ID NO: 2529 - DNA, 1521 bp, Aureobasidium pullulans
atgcagtttctcaccacattccttttgctgtgcagcactcccattgtacttgcacagcagtatgccggagacgttatcagtgccaaccttccgaccacagcaaatgcagaggttgctttcttcaagattgacgaccctagtggcaagaacaacaatcttactttgatcaactactactctcacggtaccgatggaaatcgtatcgtcgaaagtaagatccagagagctgtcattgttcttcatggtcttttgagagatccctggaactatgagaatgacatgctcaatgctcttgcaatggtccaggataccaacgtcaaccgcgacagtgttgctgtgatggccccatacttccccaatggcaatgacaagaacctcggatacccttggactgatggtctcaaggctggtcaaggatctacatcaaacgcaatggtctggtctggctcaaaatggtccgctggtgcaaacaaccaataccctcacaacagccgtaacacttctagttactacatcctcgatgaactggttcgctactttgacgacaagacgctcttccccaacatgaagcagatcgtccttgctggacattctttgggcggacaaatgctacagcgctatgccgcagtcggtgacaagcttgatacagaatctcctgttgttctatggattgccaacggagactcttgggcatggctcagcgattaccgccctctgaacattccggattgccctacctacaacgactatcgcgaaggcttcgctcaatttgttgagtacggaatgacctacggtgccaacttggtcgcacagggtcttgacgccatcaaggcaaacttcgacagcaagcagattgcctgggctcgtgctcttcaagactttggagaccacgcttccagctgtgctcctcaaaccaccggccaggaccgtaatgagcgtttcttcttcttcatgaagtggttccagcctagctgccctgacccttcgggtaccaactgcgacactgttgacctggtcgatgctcctcacgacaatggtcagatgtttcactccgctgcaggacttgctcgtctgttcaccgacaacttctacggtgacaacagccgtgcctacgactttggataccctcgcaagcaacagggtgatgaccctttcccagaccccagcctcgtcaacactcctggcacaagcaactacaacacgtatgctggaggcttgacctatcagggctgctggaccgatcaagctccaacgactgcacaagcgctctccactctcctttacgacaactcaaacaacaccattgaggcttgcacatcaggatgcgccgactctggctacaaggttgctggtatgtcagacgcaaccaagtgctggtgcggtaacgaggtcagctctgcatctgccattctcacagtcgacatgcaatgcaagtcgccttgccctggaaacactgcccagatttgtggcggaatccagcgtctgtctctcttctcttctggctatcccactttcgtttaa

SEQ ID NO: 2530 - DNA, 1308 bp, Aureobasidium pullulans
atgaagtcttcactcgtcattctctcggccgcctttggcctggccgccgccgtgcctcgccacaaccaccatgctcaccaccagcaccaccaggagatgaagcgtgatgatgctaccgcaaccgagaacgtcgacgtcttcgtcgctggacccacggtcgtcatgtactcgctcaatggcaacatcatctccgagaacgatgttctcgagggtatcaagaacggcaccctcgtctgggccaacggtgctccctccctggccgacccctcgtcctcggccgttgcttctacctcgtctgccgttgctgccgccagcaccaccttcctcacctcgacctcgtctagctattcatcctcgtccagctcgatcagcttctcgaccagcaccagtgtttcgtcttccaagcagagcgcaacctcgtctgccgcctcttcctccgcaactggtcttgacaccaccttccccgatggtgagattgactgctccgacttcccttcggactacggtgctgtttctctcaactacctcggcctcggtggctggaccggtatccaatcccctggctctggaagctcccttcttggactcaccaacattgagaccgttaccaagtcaaactgcggtggcaccaactgctgctccgagggcatgtactgctcgtacgcctgccctgctggttaccaaaaggcccactggcccactacccagggcttgaccggtcagtctgtcggtggtcttctctgcaagaacggcaagctccacaagaccaaccccaactacaagaccctttgtatcactggttcctctgaggttactgttcttgttcgtaacgagatgtccaccagcgccgctgtctgccgtaccgactaccccggtaccgagagcgagactgtccctgtcactgccaaccctggcagcgttgctaacctaacctgtcccgatgccacctactacgaatggactggcaagaccacctctgctcagtactacgtcaaccctgccggtgtctccgccgaggacggctgccaatggggttcttctgccaacccttggggcaactacgctcctctcaaccttggtgtcggctactccaacggtgctgcatggctcgcaatcttccagaacgctcctaccaccaacgagaagctcgacttcaccatcaccattgagggtgacaacatgaacggttactgcagataccagaatggacagtactgcagtggcaagaactacgactcttgtagttcctcctcgggatgcactgtttccgtatcctctggaactgcttacttcgtcttctccaactag

SEQ ID NO: 2531 - DNA, 1410 bp, Aureobasidium pullulans
atgcgtcttcttgaagctgctgctcttgtagcctttgcaccacccatcgccgctcgaggcaacttcgactttcgagtcagtcaaccacgtcgtcttgtagccatcaaggagcctagtccgaatcatgtcaccagcaacacgatctcattaggaagagccgactcgaaaagcaactctctgagtgctggataccttcaagctattagagcgggcaatcacgtagatggaatatactcacgactgagaaatggaacagcagatctcctctcagtaggagcgggaagcgtcttcctcgctcccctcgatgcaggcggagagaccttctacgtagtgattgacaccggcagcagcgacacttggctcataaacagcgccttcacctgcgtggatcctacagactctgccacaatccccgaagaagattgtgcttttggaccaacctactctttaacctcaacagtctctcaaatcgacaatcgcaatttcaacatttcctatgccgatggagaacgtctcaatggaagaatgataacagaagatctcacattcgccggcataaccgtagaaaaccaaacaatgggcctagtcacagaagcaagctggtacggcgatggtgcatcttcaggcctcctcggactagcctactcaacactgacgaatcaatacaacggcaatgaccccaccgccgacatcagaggcgtcaatattccctataaccccctcttcacctcaatgtacgcgcaaaaactcaccgcaccactcttcagcatcgccctcgatcgcgacatcgcccgctccgctcaagcacgcggtggcgtcctagctgtcggtggtatcccaaacattccccacggcaccgcatgggcatctgcgaatatttccgtggtgggcatcgatgccaccaccggccagcccgaatatcaattctactccatccgggtagacggatgggcgatctctgcaaattggtctgcggatttcgacgtcaagatgactgggaataagaggaaagtgcagctgctgggtgcacctagtagaaattccatcgtcgactcggggacatcgcttatttatgctccttccgccgtcgctgccgcagtggccgccgcattttcccccgccgcctccatctcctcacaaacaggtctgtatcatgtggattgcaatgcgcgagtccctcgcttcggcgtcaccgtttccgcaaagacgtttttcgtcaatagattggatttgatcattgataccggatatgggttttgtgtgctgggggtgcaggataataatggtgggatgactatattgggggatgtgtttatgagaaatgttttgactgtgtttgatgtaggggctgggcaggtgaggttttcggctagggagttgcagttgacgaatgggactgttacgcagtga

SEQ ID NO: 2532 - DNA, 1602 bp, Aureobasidium pullulans
atgcgttcgtcaatctttgctgggttggttggtgtgtctgctgtcggtgctgttaagcccttggtagatgtgagctactcgaaataccaaggtgtctcgctcgaaaatggaatcactcaatggttgggtgtacgatttgctgctcctcctgttggtaacttgagattcgcggcgcctcaggatcccgtcaagaacaagactacgattgtcgctgatactttcggaaacacttgtctgggaactggctccgctgccagcaacacttcatccgaggactgtcttttcatgaacatctacgctccatcgaacgccacaaccggtcacccattgcctgtatacttcttcattcagggtggaggattcaacacaaattcgaaccccaactacaacggtaccggcttgatcgaggccagtaaccacaacatcgttgtagtgaatttcaactaccgtgtcggcccttatggtttccttgcctcggaggagatcaccaaaggaggcagcactaacaatggtctcaaggatcagatcaaggctcttcaatgggtgcaaaagaacattcgcaagtttggtggtgatcccgatcatgttgtgcttggaggagcatcagcaggcgctgcttccattaccctcttgctcaccgcacacaacggacgcaacgacggtctcttccacgccacagctgccgaatcgcaatccttcgccgccgtccgcagcattaacgaatctcaattcatgtatgacaatctcgtcatccgcaccggttgcgtagactccaaggatacattggtctgtctccgcagtttgaacgcaacatacctccaatccaaaaatatcaacactcctttccccggcgctcagaaccctcccctctacatgtacggacccactctcgacaacgacgtcgtaagcgacctcaccatgtccgcctaccgcaaaggcaacttcatcaaactccccgccatctacggcgacgacacaaacgaaggcaccgtcttcgtccccgcaaacaccagcagcatcggcgaaagcaacactttcctcaaagaccaattccctctgctcacaactcctcaactcaagcaaatcaacgctttgtatcctaataatgcatccaatgtattccctaactcgggggcgtggtggagacaagcttctgatgcgtatggcgagctcagatacaattgccctggcatcaacgtctctgatatctacgctgccaccttctcccgcaaggatatttggaattaccactgggatgtcattgatcccgtcgctgcagccgccggtcgcggagtcactcacaccgtcgaaatcaacgccatctggggtcctgaaaacaccagaggcaatgcacctgtttcttactccaccactaatgcggcgatcgtgcctgtcacccaggcatattggacgagttttatcagaagtttcgacccgaatacttatagattgaagggaagtccgatgtgggaggcttggacgcaggggcagaagcaaagattgcatttcgtcaccaatgctactgccatggaaaatgtggatgcgggccagaaggctaggtgtgaatacctcagcagtattgctttggatatcaagcagtag

SEQ ID NO: 2533 - DNA, 1101 bp, Aureobasidium pullulans
atggttaacattactagagtgaacttgctgagtttggctgcgagtataccgtatgctgcggagttgcaggctgtggtcaatagctcggttgatcatttgtcttttatctcttataacgaatctttcgttactgatattctgggactcaatgtctcacaacaactagtcggaaactaccaggactttcaaccatttcacgaagccggtgtctacaatattcagactggcaaactctatgccacaagcaactggcaaggcagtctcgacaatcccatcaacgtgaccgccatcgatatccacggcaacaacagcatccagtccctccacttcgacaaactagccgaagcaaacggcggctctaccttctacccagtgggcactcccttcaacagcagtgaaggccaacaaatcgtcttctgcgatgagggtgatttcatcaatcctgctcagttggtcctggtagatccctctacaaaccagaccagagtcctcatcaacaacttcctcggccgcaacttcacatccatcaacgatgtcaagcaacaccccatcaccggcgatctctggttcaccgacgtcccatacggatactggcaatacttccgccctgctcccgtcatcaagaaccaagcttaccgtttcgaacccaacactggtgtcgtccaagcagttgccgacgacgccattgctcccaatggtattgaaatctctcctgatttcaagcacgtatacatcaccgataccgctgttcacacattccccaacaaggataacttgaccatgccctctaccatctatcgttatgatatcacacctgatggcaagaggttgcagaacaagcagctttttgcttattcggatattggattacctgatggcattcattgtgatactgagggtaatgtttacgctggttgtggggatggtgtgcatgtatggaaccccgaaggtgtcttgcttggtgttttcgcagtcgatggtggtgccgcgaactttgcctttgtgcctggtggcatgtatgtgttcaatgagcacagattgttcaaggtcactttgcaggctgagggtcgtgaggtcaagagagactttgggctctactga

SEQ ID NO: 2534 - DNA, 528 bp, Aureobasidium pullulans
atggtcatgatgcgctcaaacagcatctcttccgtctcgtccctgtcgtcacgctgctcgacagcagacccggagcccagcatgcaaatcttcatcaagaacatcgcaggtgacacatttgccctcgaggtacccgagtcaacctcgatagcgacactctcatctctccttgccatccgtacgaatcttcccgctcaggacatgcgcctcgtgtatgcaggcaagcatcttgattcgtcatcaagcacactatcggactacaacatcggccgggaaagcactctacaccttgcgctcccattgcggggtggagcacctaagaagattcgttgccagttcaaggactgcaaagatgctgctcagcgcattgtcggagattgtggcttctgcaatggccacttctgcggcaagcatcgtatgctcgagagccatgcttgcactggactcgagacgtgcaaggaggaagagaagcagcgcaaccgcgaacgcttggagaaggagagaaccgtcgccatcaagggcatctaa

SEQ ID NO: 2535 - DNA, 1758 bp, Aureobasidium pullulans
atggtcgtcgtcaaccagtgtcgcgcactattccttgcgtcatgcctttctgcagcagcgtccgcccagaatgctaccttgccaatcgttgacctcggatatgaattacatcaggcggcgcactttgatagtgccaccaatctgtataacttctcgaacgttcgttatgccgcacctcccgttggcgacttacgctttgccgcgccccaggtccctgctgtcaaccgatccgtcgtgcaaagaggtgacgttggtcgcatatgtgcacaaggtagtccggactggttcacagctgaattgtcggttgttccggacttactcagcggtaattctgcatcgatcaatgtttcagaagccaccaagaccctgcaaggtctgagagctcaaacttcagctcaagtagcagcaaactcttccgcgcttctcgccaaccaagaccctcgtgtgtcagaagattgcctgtttctcgatgtatttgccccaaaggacgccttcgatctagccggcaagggatacggaagtcccgtcatgctctatattcacggaggaggcttcgcgtccggttcgaaagccgacacagatccaacaagcttactcgatcaagccaaggtcgatggtgaagatattgtgtttgtaaccataaactataggttgggcgcttttggttggctcagtggacccgaatttcaagtcagtggcggtatagcgaatgcaggtcttcatgaccaaaggcttgcactagaatgggttcagaagaacatccacctttttggtggtgatccgaacagagtgacaattatgggttcctctgcgggagccagtagcgtcttgcatcagatcacagcatacggaggaaagaaaagccctgcacctttcgcacaagccattttggagtcgcctggtttcgccccaatgccatctgcaattcagcagcagaagacctttgatcaatacatgtcgtacctcaacgtcaccagtctgaccgatgcgcgtcagctcccttcgcaagccttacttgcggctaactctctttccatcgctctcgcaccatttggtagcttcggatacagcattgctgtggatggagatttcgtccctgcgctaccaggtcagctgttggcgaacggcttctacgacaagtccatcaagaacattatgactggacatgctttgaacgaagcactcggattcaccgaccccacgacccaaaacgacaccgcattcagaaaatcagtgatcggtaacttcccttctctggctgcctaccccgatgaagtcgactatatcctcaacactctctatcctccaatcttcgatggctcgcaagctcagaattataccacccagcttctgcgtgcttccgcgttcaattccgaggtctcgcttacatgcagcaattactacctgaacaaggcttttgcaaattcatcttatggttatgaatttgcagtgccgccatctttacatgtggcatcttctgcctccatctttaccccgacgaacgttctccgtggaaacacgacaagcaatatagactggaaatctccactcaacgatgcacagattgcttatgccatgcaaagttatgttaccagattcgtggctactggaaacccgaacaaagatggcattgcggagtttggaatctatggaggtgataattctgtgattgttgttaatacgacgggtattgctcgcgctcgagcttctgttgcgaatgagaggtgcgagttttggcagaagggcctgttctactga

SEQ ID NO: 2536 - DNA, 1632 bp, Aureobasidium pullulans; identical to SEQ ID NO: 2149

SEQ ID NO: 2537 - DNA, 852 bp, Aureobasidium pullulans
atgaaattcaccatcgcggccacaaccttgagcttcgctctagcttccgcatttcctcagaaaaatgctcaagtcgctatgccggatgatattcatgcctggcatcctgctggcgtcaatgacctcagaggtccttgcccaatgatgaacactctcgccaaccacggcttcatcccccgcaacggcggcaacatcacaaaacaaaacgctataagaggtctggctgatggtctgaacttcgacgccgccctggcttctttgatgtgggatcaagccatcatcgccaaccccgagccgaacgcaacattcttcacgcttgaacatctgaaccaacacaatgtactcgaacacgatgcaagtctatcccgcatggacgcctactatggcaacaaccacgttttcaaccccgaagctttcgcaaccagcacgagatactggacagacgaaacgcttaccgcaaacatgctggcaaacagcaaattagcacgcatgatcgaatccagagcgttcaatcccaactacacattcaccgccaataatgagcaattcagtctgggcgaagttgctgctccatttatcgcttttggaaatacgactagtgttacggtgcctagggatttggtcttgtattttttcgaacatgagaggttgcctcatgagttgggttggagcaagaagaatgagacgatgacgctgaaggatattttgaatgtcgtgtcgtctattaggaatgctacgagtctgttgaccccggagtcagcctcgaaccagactgcagatggtgaatctcatggcattcccgagggagcacaagtcgctcgccgtagtctgcatttgcccgggggtgtttga

SEQ ID NO: 2538 - DNA, 1821 bp, Aureobasidium pullulans
atgccttccttctctacccttgttggcgccttccttggtgtagcctctttggctgcaagtgccgctgttcctgtttctcaacccttcgaacatgtcaaggccaagagacagtccacgaatgctaccagcagcagtggtctcgaggtcgacttgggatatgaagtttacgaaggctacagcaaccagactacaggcatcaacatctggcgaggaatccgttttgctgcaccaccaactggatcattgcgctggcaagcacctcaagttcctgcagagaaccgttcgcaaaccatccaagccaatgctttcgcgcctcagtgcccccaatcttctttcaacgcttacggaagaactggtgcgagcatgctctcagatgaggattgtctgttccttaacgtttatgctccggagaatgcaaccaatctccctgtacttgtctggatccatggtggtggatatggacttggaaacggccaacaggatatgcaagccataatcaacactaacaacaactctttcattgctgtagctatccagtaccgtctcggtgctttcggtttcttgtcttctgatgaagtcgaccgcttcggctccgtcaatgctggaatcttggatcagaccttcgctctccaatgggtgcaatcctatatctcttcctttggcggagaccctcgctctgtaaccatctccggtgaatccgctggaggcggtgctgtcatgctgcagaccatggcttatggcggtactttgggcacctcgttgttcaagaacgccattgcggcttctccttacctgcccatgcaatatggatacaaggattgggtgccctcgcaatcctactacgcctttgcaggtcttgcaaactgcatgcccaacacaccctatggatcttcatctcgcaccatcttcgagtgcttggtcaaccaagacaccgataccctacagtacgccagtttcaatgtctccactacgggcacattcggtacttggggcttcttgcctgtcacagatggcgtctttattcaagatgtacctagccaacaacttctcgaaaagaaggttaacggtcagaatcttcttgtcggcaacaatgcaaacgagggccctctcttcgttcctcaagatatcgacaccgaggccgatctcgtggcttggctcgaacttaccttccctctcttctccaacgatgatatcgccagaatccttcgctactaccctagctccaacgcgacagactctccctctgccgtcgactttgcaacaacaggagactccggccctactgctattaacgtttcctccgtagccacaggccaacaacaacgcgccaacaacatctacgccgaaaccaccttcgtctgcccctcctactggatggccgaatcctacaccggcggcgacagaacctctttccgctaccaatactccgttcccgccgctcaacacggcgccgatgtatcaggctacttcggtcccgccgcccccactcaaggtccagccttcgaagccgcattcatgtccatctggggccaattcgtcatcaacgacaacccctccatccccaccaatgtcgcaggagagggcggtcaagctgctgtcaatttcccgcaattcaatgtttggaacccgctccaggttaaccttaatcaaactggtgggcaagaggttagctcgaatatcgtgcaaggtgttaatgctacggtgtatgtgggacctgggcttagcaatgagtttgaggttgttaatgcttatgattgggaaggtggaagagggcagagatgtgatttctggagggcggttgctaagatcgtgccggagtag

SEQ ID NO: 2539 - DNA, 1557 bp, Aureobasidium pullulans; identical to SEQ ID NO: 2152

SEQ ID NO: 2540 - DNA, 2025 bp, Aureobasidium pullulans
atgaaggttctcagcaccattgctgtttgcgcggcctctgccaatgcatttgagtggacatggccgaaggtctccgacgaacccatctatcctcccaatggatacaacatgcccaccaagggacctgtggacaactcaacttacgagtacatcgtcgtcggatctggtcctggaggttctcctttggcagctcgtctagctcttgctggacacagtgtcctactcatcgatgcaggcgaggatcacgggacagacagacaagtacaggtaccagctcttcacccttacgccagcgagtacaacccgatccgatgggacttctttgtggatcactacgccgacgaagagcaagccaagcgcgactccaagatgtcataccttactccgtcgggagagtactactctggactcaacccacccgaaggctcggtgagaaagggtgtcctctaccccagaactggtgcgcttggtggctgcgctcaacacaatgccctaactatgatacttcctactgagaacgactggaacaacatcgccaccctgactggagatgactcatggatggccaagaacatgcgcaagtatttcgagagactcgagcgtaaccgctatgtacccagcagttttgtcggacatggatttagtggttggctcgaaactcgtgtcacacctgttctactcatcgccgaagatctcaaggtcttgtcacttgtcactgccgcagccaccgccatgggcaagggccttattggaggactcttacataccgtcactggccttgctgagatcctgacgctcgacatcaacaaccctaccaagtctcgcgacagtgccgagctcatctaccagattcctctttccatggacggcgactacgttcgcagctctcctcgtgactttgttctccaagtcgctggagctactaacaaggatggttccaagaagtacaagctcgatgtcgctctcaacactctcgttaccaaggtcaacttcgatacctccaacaccaagcccaaggcaactggcgttgactacctcttcggtcagagcttgtaccgcgccgaccctcgcgctggtactgatgacggtggtgaagccggaactgttcatgccagccgtgaagtcatcgtctccggtggtgctttcaacactcctcagatcctcaagcttagcggtgttggcccagctcaagaacttcactctcacggaattcctgtagtcaaggatcttcctggtgtcggtggcaatatgcaggacagatacgaggtcggtgttgtcggcaaggctccttccgagttctcattgctcaagaagtgcgagttcctgaacggcacagacccttgctatgacaactggaagaacaatatcggagctctcaagggcggctacactaccaatggcattgccttcggtttcctccaccactcgtccgtctcggagagcgatcctgatcttttcctgggcggtgtccctgcctacttcaacggctacttccctggttactctgtccacgccacccaagatttgagcatctggacatggcttactctcaaggctcactctcgcaataatgctggtactgtcaacctcacttcatcaaaccctcgtgacacccccaagatcgtcttccgctctctcggtgagggcgttggtggcgacaaagatctacaagctgtctacgaaggtgtgcaacacggtatcaaagctttcaaggacctcattcctctcgacggcaagtttgaccgcgtctggcctccacctgagatgatttctgaggaggacctgaagcagttcatcaaggacgaggcttggggacatcacgcttcgtgcactgctcccatcggtgctgatgacgatccgatggctgtccttgacagcgagttccgtgtccgtggagttcatgggcttcgtgttgttgatgcttccatcttccccaagattccaggcatgtatatcgctttgcccatttacatggtcagtgagaaggctgccgaagtgatcatcaattcagctgcttcctcataa

SEQ ID NO: 2541 - DNA, 1560 bp, Aureobasidium pullulans
atgaagactgtcacccttctggccgttgcctttgcttccgtatcctgtgtctctgcgttgtcttcgaagatctctctggattatgcaacatatcagggaacagctggtttcgatggcataacccgattcttgggtatgcaatacgccgctcctcctgttggtgatctgagatggaaggctcctcaggatcctgctcagaccacagcaggtcagtctgccgcaaaattcaaggacgtttgcattggagtcaaacagacagtgggaactggtcctatcggtggattcacttacggcgaagactgtctctacatcagcgtcatcactccatctagtgcaacaaacacgagccatctacccgtcctgttccacattcctggcggtggcttcgcccagctggcggaccccaacttggatttcaccgacttcgtcaagacttctgggaataacatcgtcgctgttcagatcaattacagagtcggtggtcttggcttcctcgccggcgaagagtttggtggagatccaaatcgcgtcacgatcttcggaggctctgctggcgctggatccgttggactacagatgactgcatatggcggcagagatgacggactattcgcaggagcctacgccgatgcgcctgcttattcagaagtcaatagcgactcatattcgcaattccaattcaacaacttcgcgaccgctgctggatgtggctccgcaacagacagattatcctgcctccgacaagccgatatcgcgaagatccagaaagcaaatgtcgtcggcaactacaccgacattgctgcacaattcaccttcaatcccgtcatcgatggcacattcgtacaggacataccacttcgcctcttccagaccggccatttcgtcaatgttcctatgattgttggagatgccacagatgagggcacgctctttgccgcaaatgccggctctcctgaagaagtgtcggagttcatgcaagccaacgtcccaagtctcactgaagccaacttgacgacgatcaaccagttctatccactcatggccgcacaacaaccatttcacaaagcttattttccatcagcagccgcagcatttggtgaagcaacattcatctgtccaggcctcaccatctcaagcgctgttggtgcttcgaatcaggtttggaactaccgtttcgatcagagctcactagccctgagacttgctggatacggcgtactccacgctttcgataccggtgcaatattcggccccaatgccggtccaatggcaggacttttgggcatcgtagagaatggcctggtcttctcatcctttgctggcgagaatgcaaatgtggttcctatcatgatgaattatgccatttctttcgtcaggacacaagatcccaatacttacaagagtgtgttttctccgaattggcagacttacaacaataatggtggcaagcagaggatcgttgttcgcaactctggtgtgatctacgaggatgtacctgcagctcagcagactcgttgtgcattctggactgacataatcgccaactcttttgccgagtga

SEQ ID NO: 2542 - DNA, 1710 bp, Aureobasidium pullulans
atgttcgcaaaggttgctcttgtcttgactgcagcactgtccttggtggatgctcaattcaacaatccaacaggtgtcgatatttggtgtggcaaggcgtatagagataccaatgcttccttcaatccaggaggctggttccaagaaccttcaaaatccgacacaccatttgttgacttcaaaatcaaacctcggatgaacttgtatctggaagatgatacaatctccagcttcatagtcgatgcacctgtgtcttggtacgttggccatgctttgcctggtggtaacacgtcaacatcaagacagggatcgaagattgttctcaacatcgtgaccgggaacagatctctccatctgaatcagacgtcaatcaagcttgggtcaaccaacaacgagataccattcgatctatcatcgttttcagcaaggtccgaaccgcacaacatcacagtgactggtacactcgacggccacaagaatgtgactttcaccgccacgactcagcttaacaggctgccgcttcgctcagacaacggtacggcgactcggcttgataacctgtatggtggcttgtctgttcgaaaagggcaagccaaagaatggacttctctgttcccctacacgtattatgtccaatggagtctatactggtacgccaacctgacaaccctcgacgaatttgcagcaatgggctacaacgtaattcacattgtgcccactggcgaccttggcgatacaccatttccctgggacaaatttcaaccctatttggaccgcgcagacgagctaggtctctactttatgtacgacgtacgctgggattatgccaatctcaccacaatgattgaccaaatccatcacttacacacgcacccgtccattcttctatggtacacggcagacgagcctgacggcaagtccaaccctatcaactcgactgctatagcctacaacactataaaggcaatcgatccctaccatcctgtctcattagccctcaactgtcgagacttctactacgccgattatgcagcaggtgctgagattgttctcgaagatgtctatcctattagcacgaacacctcgtactcggccgtctacgatacaccttgcaacgctacctatggctgttgcggctgcgacgactgctcaggcagcttcaccgacatctctgatcgtctagacgaatatactgccaaagacaatctgcttggctggcaaaagatccattgggcggctcctcaagcattcggaaacgagacattctggactagatatcctaccgctgccgaagaggtcgtgatgaacatgttgagcattaatcacgcggccaaggggattgtgatgtgggacttccctaccaaggccgaaattctcgaagtcaccaacaagttggctgctgttctgactgacgagaaggtggcgaagttcctgataggagcgccattgacacagaaattgaaggtggctggtgctgagaatatcgatgctgcggcctggaccaaggatggcgaggtgctggtctctatcgtcaatcttgactatggaaatacaccttccaatgtgacggtcaccttgcctgaaggcatgaaagttgctcatatggaggaaggtctctgggggaatgcttcgtggagtgtgcacggtgagaagctgtctacaaactcggttatgggcttagaagtctccttgctattgctgaaaacatga

SEQ ID NO: 2543 - DNA, 1692 bp, Aureobasidium pullulans
atgaaagtcctcgctagtgggttcttgctgctcaatactgcatctgcagctgccaccaaaagatacaatgcctatcatggcgctgccgtacctacagtacaagtcaaaaacggcacctacacagggtaccatgctcccgtctacaataccgacaacttcctcggcatgccatatgctcaaccaccgatcggcgatttacgcttccgtgttcctcagtctctcgactctacctggtctggctcgaagaatgctaccgagtacagccccgagtgtattggctatggcagagatacctggagtcaaggcaactatgtcagtgaagactgcctgacattgaatgtcatcaagccaaccggctcatgcgaaagccttcctgtccttgtctggatccatggaggcggtcttgtcatgggaggtagtggagaccgtcggtacaatcagtctttcatcgtccagcaatctgttgaagcaggcatgccgatcattgctgtcagtatcaactatcgtctttcgtcctggggcttcttgtacggtcgcgagatccaagagtcaggtaatacgatgaacggattcagggaccagcgtcttgctctacgttgggtgcaagagaacgttgctgcttttggtggtgatcctgaccgtgtcactattcaaggcgagtcttctggtggcacgtctgttggagcgcaattactcgcctacaacggtcgggatgatggtctctttcatggtgctattgcacaatctggagctccgattagccccggagttgacttcgacgttgatgactgggagcctatcatcgccaacatcagcagagctactggatgcaacggcactggctctgtactcgactgtcttcgcaaaatacccactgatcagctcaactctgttataaactctaccgtcacgagaggagcccgctacggccctgtggttgatggagattggttcacccaaacagcttcgcaagcactgtccaacggcgacttcttgaaggtcccatacatcatcggcgtcaatgaggcagaaggtgtagtctttggtccgagacaagtcaatacgacccaagagatcttggattacattgttgactcggctattggcgtaccgagcactctccacggcagaccgaactctaccatcggacttcagttcaaacgtagctctgccattgctcaagacatgagcatgaacgccgcaagacgcctgacatcccactggtgggcaaggcacggtgccagatcctatacctacatcttcaatgccctggtcaatggcctctcctacttctcaggcgcagtgcacttccaagaggtggctttcgtcttctacaacacagaaggcctaggctacccgcagaatggcaatcccaaccctcttggtggaccagaaagcgaatccctcgtcacactggcgaagcaaatgtgtcgtatgtggatcagttttgtgaactatggtgatccaaatatgcatctgggcttgaaagcagagccttggaatcctgttgatgcggaagagcctgagttctactatttccagcagaacgagacgtcgaagtcgctgcctgatatcgttcgtgcggagggagtgagttattgggaggagctgatcatggcgaggaagggcactgattgtactggcatcgttgcttgtggtggcagttatgatggagacctgaataatctgtga

SEQ ID NO: 2544 - DNA, 1041 bp, Aureobasidium pullulans; identical to SEQ ID NO: 2157

SEQ ID NO: 2545 - DNA, 783 bp, Aureobasidium pullulans
atgccttcaactctcttccccggcgtcgctctcatcaccggtgcttcctcaggtatcggtaaagcaacagcaacatccttcgctcaagaaggttgcacccgcatcgccctcgccgacatctccgaagcttccctcaccacaacccaagaatccctcaccaaatcctaccccgacacccaattcctcgccattcccaccgacatctcctcccccgaagcagttcgaaacctcttccgcaaagccgtcgaaaagttcggcagaatcgactatgcagtaaattgcgccggtgttttgggggcagcaaagaaatcccatgagatgactttggaggaattcgatcacattgttaatgtagattatcgtggatcgtggctgtgttcgagggaggagttggaggtgatggttaatcaggagccactggagactcacgatgggagaaaagggagtagaggtgccatcgtgaatgtggctagtcagttgggtattgtggccagacctcaagcaccggcatactgttcagcaaaagctgctatcattggcttgacgaaatccgatgctttggattattcggaacataatatcagagtcaattgcgtatgtcctggcgttgtcgaaacaccacttatcaacgatgaggtccgaaaggcgatttccatagctcccatgaacagagcaggtacaccgaccgagatcgccgactgcatccttttcctctgctcaccaaagtcatcgtttgtccaaggagccgcattggtagcagacggcggatacactatcaactag

SEQ ID NO: 2546 - DNA, 1629 bp, Aureobasidium pullulans
atgctatcggtcatctgccttctcctgggtctagatcttgtttcctccacgcctctcgcttcgaaacatgcacggagctctaccgtgcaccttggctatgctacctatcagggtgctgcattagacaccggtgtcactcagtatcttgggatgcggtatgcatcatcacccacgggagagctccgttggcgcgcacctcaggatcctcccacaattcaccgcgtccagaatgctacgcaattcggagctctgtgtgtcggcattggagagagtgtgaacatcaatcgcacggaagattgtctgtttatcaatgtgtatactcccaacaacgcgaccaggtcatctaagctaccggtgtgggtatacattcccggtggtggatacgcaaaagaaacgaacagcaactacaacgcaacagaggttatcagagcttctggccagaatgttgtgttcgtgaatttcaactaccgcgtctcggcatatggattcctagccagcaagaaagtgagagaggacggcgatctcaatgtgggcttattggatcagagaaaagctctttactgggtgaagaaatacattgctcagttcggcggcgatccaaatcacgtcgtgattcacggtgtgtctgctggcgctggttcggttggaacacatctcattgcatacggtggccgagatgacaagctattcgtcggcgccataggacaagctccattctttccatgtcagaatgatatctcacaatcggaatggcaattcgaccgcttcgcttctgcagttggttgttcgaatgtatcgaatcagttggcttgccttcgagcacaaaatctaagcactctccaagcagccaacataccatcgccctttcccggtcagactattactccacttttctactatcttcctgtcatcgacggtgatttgatacaggaagccccgatccttcaattcgagagaggcaaacatatcaaagtgcctctcttggttggcgatacgacgaacgaaggatcagccttcgccgcaaatgtatcgacacctgccgaagtctcctccttcttggcggccaactgtcctcgtctccctgcatctgctctggaagaggcaaacaagctctaccccctgatgagtcctttacctcgtcatgcagtctactttccctctgcttctgccgccaccggagaatctacattcatttgccctggactgttgatgtctgaatctctatctcgcggtcagcatagcaaagtctggaattaccgcttcgatgtttccaccgtggaagaaacagccgctggattaggtgtgccacatacctttgatacaccagcgatttttggtccacattatcaaggtcctgcagtagcggcatctctctcagtacaaccgtttacgacatataatgcacccatcgtgcccatcgagatgaactactatatctcctttgtccgcaccctgaatccgaacaccttcagagctaaagatgcacctatctgggagcctttcgagggaaagaatggacagcagagattattatttgaaatcaacgggactacgatggaagctgttcctaaggcacagcaggagcggtgtgacttctggtactctctggcggagattgacggagagtaa

SEQ ID NO: 2547 - DNA, 291 bp, Aureobasidium pullulans
atgcttgccgcaaccatcatcacagccttcatcggcagctccatcgtcgcagctgctcctgccgatgtatcggctcgtcagctcaccatctgcagcggaacatacagcaatgctcaatgttgcgccaccgatgtcctcggtcttgccgacttgaactgcgcaaaccccccgaccactcctactagccaagaggatttcatcgatatctgtgctaccgagggccagcaggctcgttgctgcgcgctgcctatccttggtcaagctctgctgtgcggttcgcccctgggttga

SEQ ID NO: 2548 - protein, 572 aa, Aureobasidium pullulans
MRLEVLTISAVAVFGLGTSVAAHPGPDAKKQSSVQRPISWTLLGADQFQSTSTSSVASDTAFSYTQVTSDRYATPIASPVKYQSAFAPPYSKAKSLLPSGITYTTYSLNPSATSDGRYGQSAYAALWAGYSYLHTVPFTTTALPTLVATSELVFPPALPFETSSASMKFDKDFVWGVAGSAWQIEGALQQEGRGPGGLDIFGNQKIPALAGQNDSAVTDMNYYLYKQDIARLAAMGVPYYSFSISWSRIVPFGNANTPINQQGLDHYDDVINTCLQYGIKPIVTLVHADTPPSVDYDNATSSTADYLWYKQTLKGTGKVTVKFANNLAVPRDPANKDDVAAALRYQDFILGVWGNPLFLGKQYPSSVLNTAVNLTALTPQQIDSIKGSVDFWAFDPYVSQLASAPDDGLASCINNSSHTLFPYCANLTQNGIQQNGWQFGQKSNDYAYIAPQYVRQQLGYVWKTFQPAGGIMITEFGFNPFKDAEKTLPEQRYDLERTLYFQAFLTETLKAMYLDGVKVIGALAWSFVDNNEFGSYENQYGLQTVNRTSGKFERHYKRSFFDLVDFFHNHIA

SEQ ID NO: 2549 - protein, 493 aa, Aureobasidium pullulans
MKLPFIAPLVLTISSSILHCSAQLVGPVGPTTSLTQKTHICNILDYGAVADNVTDISSALHAAFDNCVQRNQGSRLYVPTGNYLLKQSVVLSNATSWALQLDGLITAAYGGDWNVERELILQGFAGRQKLGELIDGEGDKNFLLDVLVIVNAVDFEFYSSNGLGAIQGQGYLYRNLNNNDRPRLVRLISPTNASVHDLILVDSPKFHFVFDYGLNIEVYHLTIRGANLGSYDGIDAVGTNYWIHDNEVTNRDECVSVKSPSNHALVENLLCNQAGSGISIGSLNVSAQISNIHARNISILNGNNVAFIKTYPGGSGYVTNVTWENFRSKASLYGLSINQYWQNTFTPDTGAVALSNLVFKNFTGSVANGVQRPPLYLVANDLTFALNVTVQDIKLWTEAGSSVVNHINNIFGRGDNIYSPGDGIRTSPANGTPTSYSSTITVTQAPTGWVGPGYPAWAVPTTGYGTNVPIPVYTPAVLWKPTGDYDKHYWGSF

SEQ ID NO: 2550 - protein, 440 aa, Aureobasidium pullulans
MKYSTFVVAAAAGTAAAASAPAYGQCGGQGWTGATACVSGYHCAAQNDWYSQCVPGAGSSAPQTTKVVTSVKPTTTKAATSIKATTTAAASKAPVTTAASRASTTSKAATSSVASSKGKVKYAGVNIAGFDFGIDTNGGSGTYQDPGTTGQSQMNHFVKDDKLNAFRLPVGWQYLVGNTLGGNLDSSFFSKYDAQVTYCLNSGAELCIIDLHNYARWNGAIVGSSGGPTNAQFASVWSQLATKYASKPKVAFGIMNEPHDLQDINTWATTVQAAVTAIRKAGATQNLILLPGNDWTHAAQFVDNGSAAALNKITNLDGSKTNLVFDVHQYSDSDGSGTNSACTTDNVAGFTTLATWLRANGRQAILTEAGGSNDQSCLTNVCTMLNYLMTNSDVYLGWTGWSAGMFASNYVLSEVPTGSAGSYTDQAILTKCIAGVFNSK

SEQ ID NO: 2551 - protein, 793 aa, Aureobasidium pullulans
MFIKTASTACLAVTFPFAFGLDVPPRNNSAQHIALGKAKVFLSQLDTAEKIGLVTGSYGPGPVLPCVGTIAGIPRLNFSGLCYSDGPTGYARSDGVSVFPSGVTVAATWDRDLMYQRALAIGEEFRAKGAHVHLGPSPGPLGRSIVAGRNWEGFGPDPYLAGVATNASVTGIQAAGVQASSKHYIGNEQETQRGSSTLSGGLTVSNGTVIDAVSANIDDRTLHELYLWPFANAVHAGTASVMCGYNRVNGNYTCANPDILNRILKDELAFSGYVLSDWDATHSTELSANGGLDMEMPGTQSVSEVSYFGDSLLAAVNNGTVSLDRLNDMVTRVMMPYYLLGQDQDFPEPDPASGGVFLNYQYGYNSPLSSVYPAVDARDVRADHAKIIRRIGAAGTVLLKNTNGALPLTHETNIGLLGNDVSYPTIGSVYLDYDNAEGYEMGTLDIGGGSGTVRHTSFSTPEEAIERKARKLGIRVQKLFDNKEVAEGLFRTIYPRPQACLVFLKAFATEGTDRASPDLQWNATAVVESTAAFCPNTIVVTHGPGVVAMPWADNPNVTAILAAHYPGEESGNALVDVLWGAVEPSGRLPYSIPRNSSDYGPPILSSVANATDPNAWQVDFTEGQMIDYRQFDANGTEALYEFGFGLSYSNFTMSSDTSFELIDGPLSALPDQSQGMVPGGLADLWKVVAVLKVEVTNSGHRASSAVPQLYVSLPQDTTPPGTPHKVLRGFEKLHLKAGERREARFELMRRDLSYWDLENRQWVVPEGIVQFSAGFSSRNLVARTHARLVYDQN

SEQ ID NO: 2552 - protein, 245 aa, Aureobasidium pullulans
MKFLTAAAVMLGVASAAPTATIEKRAQQCGQWDSKVTGAYTLYQDLWGISGYTGSQCSDINSLSGTTLNWWTTWSWAGGSSQVKSYANVVTKTNAVQISKIKSLATSWKWVQTGSNVVADVAYDIFTSSTAGGKNEYEIMVWLAALGGAGPISATGSPIATVTVAGHSWKLWYGNNGVNEVYSFTPNGSNVSSFNGDLMDFFAYLIKSQGFKDSQYLISVGAGTEPFTGSNAKLTSAYSLVPAYK

SEQ ID NO: 2553 - protein, 402 aa, Aureobasidium pullulans
MSSASTSSALYATVSSSSRATGAVPKNTKELRHHNKNGKGFINPWDSYVDRTAPQIISALIWRKLSGKQNTPDTTPPTVPVQKPDFLPTRETKTLRATWLGHACYYVEFPSGLRVLFDPVFEPRCSPLSFMGPKRYTPAPVDVADIPIIDAVVISHSHYDHLSYPTILKIKEKHPNAHFWAPLGNKPWFSKCGIENMTELDWWESRDFTLSAKKQDAETTHTETGSTVNAGGAEDIKAVIGCLPCQHTSARTPFDKSHTLWGSWSIESGGKKIWFGGDTGYRSVPDLPEEENDYDEKHNYPTCPAFKEIGELRGPFDLGLIPIGAYDPRFIMSPMHANPFDSVNIFIDTQCKKALGIHWGTWVLTEEEVLEPPKLLKKAMAWKSLPETGVFDVCNIGESREY

SEQ ID NO: 2554 - protein, 306 aa, Aureobasidium pullulans
MHFSSLIAPVFALLGAVSGNSLAGRAAQLTQVQNFGDNPSGTGMYIYVPQKLAAKPAVIVAIHFCTGTAQAYYQQSPYSKLADQKGFIVIYPSSPHAGTCWDVSSQKSLKHNGGGDSNAIANMVTYTLKKYNADPKRVFVTGSSSGAMMTNVMASTYPELFAAATAYSGVPAGCFVSSSGQVDAWNSTCAQGNVDQSAAYWTNVVKNMYPGYNGARPRFQIYHGSIDTTLRPNNYRESVKEWTGVFGFDANKPQTVKNNFPANGYTTDIWGVDSANPLGKVQGIYALNVGHTVPINGAQDMAWFGL

SEQ ID NO: 2555 - protein, 241 aa, Aureobasidium pullulans
MFFSTSSTALAALVLAPLALAAPATSPNPAIFERSLNSGKGTWYGMSCGEEACWQQGACAFTDYVLPSSIAGSTCVSETIWNNGQNCGGCVSITYKGGAKKIAMVTNKTGGDKNHLDMSPNMFSKIANKNLGEIPIEWEFVPCPITDGLQIKMHGGSSQYWFAATVMNARLRTFKLEVSGDSGKTWKPTTRNVNNFFEITGGTGTKTAWVRATSEKGDTVIVKDVDMSSGKTTKSTVNYKA

SEQ ID NO: 2556 - protein, 369 aa, Aureobasidium pullulans
MKTAFLLGGALAVGVYSATTSGCGKSLPARIDRGGANQTNSLKFTTSGGTVREYGLHIPTSYDSDESTPLAFSFHGRTRIWQEEEEISGMSNETLNPNYIVVYPQGVDMQWQGDPEAVGYDDVSFTLQLLADLSSTYCLDTNKIYAAGKSNGGAFSANILACHPEASRTFAAFGGISGAYYQGNSDADCNAATVPIPCNASRPVPIFTTHGDADETIPYDGGPRRDRCLPNLPHFMTQWSDRNGFGTSNTSTSLYHKNVVQYEYGNETYPGFNTHLRVHGLGHYWPSLANGSSFDATPLLLDFFNKWTLDAVNTTSSATSSSSGTPPVSSTSSTSSAAASTSSAGEINAVGQQQWFLGGLLGVVGWLFI

SEQ ID NO: 2557 - protein, 545 aa, Aureobasidium pullulans
MRLASYTSVLLAARAVVSQPTGGHSDAVSLNIPRIASGASIEHDPSFASFSFEPAFWVEFFGNSSSPNQLAFNLLNRIVDHGGQPTIRPGGITMDSMIFDPAGADPVRTTNPKGGVYRTTVGPAYYESWSNFPKGTKFVSTLNFGNNSLDIARDMAVASVKYASNDSISFFELGNEPTNYPSSRWKNSTAAYVQQWKNWTNQIDAAVNRTLGNDSAAEFGSERWWASSATTDKSGLEVRPAALIPAGINSDDQVADYSIHSYPFSTCDPARAVLATTQNILNQTELARYADEEIYPSAKAALDAGNRWIIGEFNSISCSGNPNVSDTFAQALWVIQSELIYAARNASAVYLHQGAALVFQSSQQVNSAGQDGSPGYSTYDMFYPRNSEKRGPARVLPSFSSQLFMAEAFAIQDTRIRQVGTPSGVDKDYFAAYAFYVKNKLNKLAIINSKPYYANSTSDFTVTLDISKYGHSKKGTRAWLKRLTAPHVDEGSANKTTFAGQSFPQGNATGDLDVESVGRDGIIKVRGSEAVLVFFDKRDANMNAC

SEQ ID NO: 2558 - protein, 786 aa, Aureobasidium pullulans
MKSFSILAGLVGLASASNWNETWTHSSSSTSWSATDVTSSSSWVPEHKPTGWSSESSSSSVPAHKPTGWVPESSSSSVPVHKPTGWVPESSSSASVHKPSGWVPESSSSAPSWKPTGWVPEHSSSVSTVTKDNATSTLVTYVTTTVCPATTVVNGHTSIYTTTSTLTVTSCKGGCKPTQAPSTWVASPTKPAEHNITSTEVVYTTTSLCPVTTVKQGHTFTYTTTSTFVVTSCKGGCTKPTQSVPDVTKTEEVYTTTTVCPATTVVNGHTSVYTTTSTLTLTSCKGGCTKPTETHTVPVAPYPQHNTTAATTQGHHVPSGLVPSGWVPVPVPSVKTKTVSEVITVITTCSSGEVITTGGVKTTLTTPSVITTTLTQTSQKTITPPTQGHAVPTAPVYQNGTTKYVTDITTTYLTTCPVTTEIKTGGTTKTSVYTTVSTATTVIKISKTGSIETPATSAPEAPKPTTLTRYSTTEITKSCKECASGTQVLTTSYPVVIVETPSKPVQIPASSPVSPVGTGKVTVVVPVTQYTTTCPYTTTDKHGSTSVFMTTSIVSHPVESTTVPVVPVVPSSKPVESAPVQSSKPVESHPVAPTTAVETHPVAPTTAPVESHPVAPTTAPVESHPIAPTTALVESHPVAPTTAVETHPAAPSSKPVESAPVESHPASSPVSPVQSTKPVESAPATTPAASSPASKPSGQVVTQISDGQIQAPGPSSAPAVPATSGPIASSVASVLSSSVQVNVPSSTSGSIASATTSTPAQYTGAASKTNASFMAAIAAVAAAFFF

SEQ ID NO: 2559 - protein, 417 aa, Aureobasidium pullulans
MFFKHTLAALSAVATAFAAPHMKRASGFNWGNEVMRGVNLGGWLVLEPWITPSIFQAYPNSQGIIDEYTLGEKLGSDAAYNVLKPHWDSWVQLADFEKIAKSGFNVVRIPIGYWAYDNANSPYVSGAAPYMDQAIAWARQTGLKVIVDLHGAPGSQNGFDNSGQKTNNVDFQQGDNVQRTLAVLQTIQNKYADSSYDDVVAGIELLNEPLSTVMNLDDLKQFERNGFGQQRTVSKKRVVIIQDGFQPPNTYNGWLTPSDNNAQNVALDHHEYQVFNNELVSMQPWQHRQYVCNNAKTYGGADKWTFVGEWSAAMTDCAAALNGYGIGARYDGTYPGSNYVGSCGSINYIDQWSQTMKDDTRGYIEAQMEAFERNTIGWVFWNFKTEGSPEWDAFRLIDAGVFPQPLTDRKFNQICSS

SEQ ID NO: 2560 - protein, 800 aa, Aureobasidium pullulans
MRAFSPLSLFSVVTAVFTLLLVLAPSQTSASPVTSVKRATSSNYWLANIKRQGSVAYGSDSSYAVYRNVMDYGAKGDGSTDDTAAINAAIAAGSRCGWGCDSSTVKPALVYFPPGTYMVSQPIVMLYYTQLVGDALNLPVLKATAGFQGMAVLDSDPYDSSGANMFTNQNNFFRQVRNFKIDLTGMPQTAGAGIHWQVAQATSLQNIVFNMIPGSASKQVGIFMDNGSGGFMSDLVFNGGNYGAFLGNQQFTSRNWTFNNCNTAIFMNWNWAWTLKSVSINNCGVGLDMSNGGSTNILIGSVILMDSKLTNTPIGVKTSFTSNSAPATAGTLIIDNVDFSGSPIAVASADGSSILAGGKVVTSWGEGRQYAGTSGSRVQGPLAAPSKPAALLDASGKFFERSKPQYESLPASSFISVKSFGAKGDGVTDDTAAIQKAMAGTTSNQILYFDHGAYVVSKTINVPNKIKMTGEIWPLIMATGSFFADPSNPQPVFDIGKAGEAGAVEITDLMFETKGPAPGAIMLKWNMASAQGASGIWDAHVRIGGSAGTGLQSDKCSKNPSSTAVNTACEGAYMLFWAGTKSAGVYLENTWFWVADHELDLPDHNQINIYNGRGVYIESQGPVWLYGTSSEHNVFYNYEIRNAKNVFMGMIQSETPYFQSNPKAPAPFVPQRPSDPTFSICSSQNPSAPCYKSWGLRVIDSTNVFIHGLGLYSFFENYSQDCVATNNCQQNMIGLQGSNNNLNMYAVTTKASVNMITLDNGVAAALDADNRNVFGATVAYYRKGGSSARDCDDEDEEDDQ

SEQ ID NO: 2561 - protein, 404 aa, Aureobasidium pullulans
MYISTATLSSIVLAASLASAAPAHIKRADAYAQCGGQGFTGASTCVSGYHCVASNDWYSQCVPGSGSGSAPVVTSAAAAVKTTSVAAKAPVATSNKASTQPADSLNRLFQAKGKKYFGTAADQGTLSNSQTSAIVKADFGQVTPENSMKWDATESSNGNFNFNGGDYLVNFASQNGQLVRGHTLVWYSQLPNWVQQITDKTQLTNVMKNHITKVMTHFKGKIYAWDVVNEAFNEDGTLRQNVFMKVLGEDYIRIAFETARAADPNAKLYINDYNLDSASYSKTTGFISHVKKWIAAGIPIDGVGSQTHLGKSGSFNNPDNVPAAFKAVCAAAPECAMTELDLAGADATSYVKVVNACVQTKNCVGITEWGISDSQSWRKSDSPLLFDSNFQKKAAYTAIVNALK

SEQ ID NO: 2562 - protein, 293 aa, Aureobasidium pullulans
MKFSHIIISALSVGSAVNAAAIPEEAANSLSVRSSYDIATSPEPSNTLEKRKGGGGGGRGGGGSSSGSSSGGRGSSSGSSGSSSGSSGSSGSSGSSGSSGSSGSSGSRGSGSSSGSSGVRPSYGSGGNYYAGGASTPYRAGGRSPGGVAPYVLGGAALGIGAYALYGAGAYAYPYAHPYYFHNRTEAAQNQSYTNSTNTTLPVQCVCAQNSECSCEDQQDDSYLASIIGNGSNSDINSTVARIANVNGTDTLIINGTLPEGTGSTSAAAAMRVPESAGMWLIAAGVGAFVYAM

SEQ ID NO: 2563 - protein, 609 aa, Aureobasidium pullulans
MSTPVSCRKLLLLIVFQHEGCSEPQIYTALTPLILAREILAQNYTNATNSAVPSSTTVNGTAVANPSAFVTNLQLSVEDLWDFFVGPVDTANTTTTIEATPVPSSSSIPPPFIGSYGFPPGRQVPLVTKNESWSFPKDFYLGVAGVSFQIEGAARADGKGPSTWDVNMHRVPGFATDNSTGDITDNNYYMYKQDIARLSAMGINAYSFSIAWTCLFPFGTGPVNELGIAHYNDIIDTCIQYNITPMATLYHWDMPALLQNQYGGWLGEQIIGDFTEYARIAYSRFGDRVKHWFTINEPIVICTSQYPMPAGYWRNFSIPNVEQPFVCGRNILLAHAAAYRLGKSIIPDSSITFKNNGGYKVPLTNSSADAEAVQRAWDFNEGWFADPVYLTGDWPSTVNDYVSSFLPPITSQQKQLILGSADFFAHDAYTAQFYMAPDAGIESCVVNASNPLYPSCANSSYTYGPAQGNWIIGPAADSHSPWLHLATDWFPAFMSYINTTWPSPHIQITEFGFAEPFESSKTLLQDILWDLIRTSYYHDYMEAILISLSEGIKITAALAWSFVDNLEWNSGFSVRFGLQHVNFTDPALERHYKASFFEYTNMYQTYVEK

SEQ ID NO: 2564 - protein, 659 aa, Aureobasidium pullulans
MALLAGLAALPTLTFASPTLHKRLANGLALTPPMGWNSYNHYNCAPNQSIIHSNAEALVSLGLADLGYTYVTTDCGWTLPHRTADNELTWNETLFPAGFPALGQYIHDLGLGFGVYSDGGILMCMNTELGTNQTGSLGYETTDAETFVSWGADLLKYDNCWSSQERGFPNVDYEPLTSPHQNYVNMRNALDATGKDMLFQICDWGVDFPSAWAPDLGNTWRVTNDIIPNWRTIFRIVNQVVPQTDYAAPGRWLDLDMMEIGNDIFTHAEEQTHFALWSILKSPLTIGCALNDSITSVSAESLAIMKNENVISFNQDTLGVSANLTRRYSDEGYDIWSGPLSGNRTVAALVNWNNFSIDATFDLPDAGLQSAGWVRDAWTNETRKNVMTSYKASVEAHGTLLLELDDTIPAGVYQLDGQSGDINLENVYALTTSDAYTVTIHFSSPVPSACDLGIHNQHQRSSHQVQQGQSSITLPVSLIAGNSNTLSISNTNSISSITVTPPTGKFYPNTAFAISGSGNASHITCVPGLCSPLGTKIGDLSPNNSASLNIPASATTTGSRYVELTYINNDVAIGTSWGEGRNARNITITVNNQTTRLEVPLSGRSSELYSSMKGWGDSAVLGVLVDGWKQGDNDVVIGNIGGEKGVQPLGADFVGLKVF

SEQ ID NO: 2565 - protein, 524 aa, Aureobasidium pullulans
MMEKLASTLMMCGIVNAALYDGVISTSHGQVQGHPAFNSTPNGNLTNWKDITVWRGIPFAASTAGENRWKAPKPAGRWNGTFDAKNYGDICPSTSSNSEYTISEDCLNLNIWTSATSTKQKRPVVMWSYPAYSTAADALFDGAGMADAGVVYVNYNYRTGALGWLAHPELSQERVNTVGFNSSGNYGMLDQFAALKWIHDNIEAFGGDPNRITVMGQSAGSAATQHILNSPLTKGLIVGAIIESGVRDPHDPLCETLAENYRNLTFALNQGLDYLADKNTSSIANARKLDYTTFVDSDFPPTSSSWTFTATLDHYALPDTYENTLRKGAANDVPIITGNTRDESGATYGLNITIAEYLADLNETYSGQWVDKFLELYPGNNASQASESENQQFTDRSIIGTWIWAQKWKQAAKSPIYTYIWDHAPPGQSQGAYHESEINYVLNNLYGTDSPWTDEDYEIAATMNSYWVNFIKTGDPNGQGLTRWDKSNSKEITQRLGDGFGPVPLALADRVKLMEEWLLTQPVW

SEQ ID NO: 2566 - protein, 425 aa, Aureobasidium pullulans
MHHISHLALAASLISSALTSPVDVTGKKTVSIADIKGKKTFSVEQVLAKKQQMQAPALSMLKTYAKFSGTAPVQLKAAAAAIQAGTVQATPQNYDMSYLCPVSVGGQTLNLNFDSGSADLWVYSTLQPTSQQSGHSIYDPSKSSTSQLLVGNTWSIKYGDGSSASGNVYADKVIIGAVTATSQAVEAATSVSDSFLKDVNNDGLVGLSFSNINTVSPNQQKTFFDTVKSTLALPLWTANLKKGAPGTYDFGYIDSSKYSGKITYVDVNSASGFWQFTADGYQIGSSSTVSSSFVAIADTGTTLMYLPSSSVTAYWAQVTGSGYDKNQGGYTFPCSSTLPDFNLVVGGNKFTVPGSYMNYAQISYTTCFGGLQQNTGLSFSILGDIFLKSQFVVFSEVGGKASLGIAAMYNGTPGEDDGDEWECED

SEQ ID NO: 2567 - protein, 479 aa, Aureobasidium pullulans
MSRTSLPKDFLWGFATASYQVEGAPAEDARGDSIWDVFCRIPGKIAGNENGDIACDSYHRYKEDVKLLKDMGARAYRFSISWSRVIPLGGREDPVNQKGLQYYIDLVDELLANGIEPMVTLFHWDLPQGLERYGGLLNKEEFVADYAQYSRITFQALGDKVKYWVTFNEPWCSSILGYNEGVFAPGRTSNRSKSSVGDSSTEPWLVGHNLLIAHGAAVKIYREEFKPTQKGQIGITLNGDWVEPWDPEDPKDIEACQRKLEFAISWFGDVVYFGDYPESMRKQLGDRLPRFTPEEKNLVQGSNDFYGMNHYCANYIKHRSGEPEPEDYLGNLESLLVNKEGQEIGPVTQSPWLRPHAVGFRKLLKWISDRYGRPVIYVTENGTSLKGENDLSKEEILEDDFRVWYFKEYVTAMAEAYTHDDVDVRGYMAWSLMDNFEWAEGFETRFGVTFVDYHNGQQRFPKKSAKAMKGLFDSLMRES

SEQ ID NO: 2568 - protein, 538 aa, Aureobasidium pullulans
MKVAAYASLIGAATAAVTPGQSILKAPKQASEAWSKPLHNLQESLKSLTGEARQVWDEVALMFPEAMDQTSFFSLPKPHSRKHDNEWDHIMKGADVQSVWVENAKGQKEREIEGKLENYSLRTKKVDPSHLNVDKVKQYSGYLDDEEDDKHLFYWFFESRNDPKNDPVILWLNGGPGCSSLTGLFMELGPSSINKDGSLKYNPSSWNANASVIFLDQPVNVGYSYSGGSVTNTVAAGKDVYALLTLFFKQFPEYASQPFHISGESYAGHYIPVFASEILSHKKRNINLQSVLIGNGLTDGLTQYPEYRPMACGEGGSPAVLDAQQCQAMDNALPRCLSLIQSCYDSESVWSCVPASIYCNNAMIGPYQKTGRNPYDITKKCGSNSLCYDELDWISEYLNKPEVMKALGAEVSKYDSCNFDINRNFLFAGDWMQPFHRLVPGILKEIPVLIYAGSLDFICNWLGNQAWTEALEWPGHKDFKKTPLEDYVLKDGSTAGAVKSSGNFTFMRIDGGGHMVPYDQPVASLEMVNRWVAGEWLA

SEQ ID NO: 2569 - protein, 383 aa, Aureobasidium pullulans
MKYTGFAASATALMAGVASAAVTGVTGKPEGFASGTTGGGDTAAVYPSTTDELVSYLGDSSPRVIVLTKTFDFTGTEGTTTSSGCSPWGTGAACQQAINKDDWCTNYQPDAPTVSSITYDAAGTLGITVASDKSIVGDGSKGIIKGKGLRVVNGASNVILQNIQISDINPHYVWGGDAITLDGTDNVWIDHVTTSNIARQHIVLGTDACGNVTISNSYIDGSGDYSATCDGHQYWALYFDGAGDKISFKNNYIYQTSGRAPKVQTDTLLHAVNNYWNDNSGHAFEIGEGGYVLAEGNVFENVEAPLEASSFKGELFTADSGSACSSALGRSCEANSLSGSGTFSESNTDFLSKFAGASIATAGPASEIKSYVTSNAGIGKLAQ

SEQ ID NO: 2570 - protein, 891 aa, Aureobasidium pullulans
MAGKFSRLLGLAALIGLASAKSTTTAIPTASACPKANGRTIYDSNGAGYLVTCSADNDRGSYTNVRAETSYLDCMTACDADTSKPCVGFTYVGGDNGTNSGTCWLKEKMTTYPSANANVISAVRVSDAPNDDRGSKSSSSSSSSIPSSIRSSAASSARSSAASSSSKQSSTSSLVSTIASSARSSAISTTTKSSSSTAQSLSSSSAVPSTSGNLCPSYNFTTYADTEDNNWQILCGFDTSPASFGVVDVSSFALCLEACNAQDGCVSVSYFGTACYFKKGFENSTPSKNVNSAYIINRANYPVPSRNDIYAGRGCGASLPAGVQAGGRTTHFSINSGGLNRSFSIHVPSSYDIKSAAPLIMAFHGRSETPVNIERYSDLSSEVWNPYGIVVYPLGFGSYPQWQSDPDAVEQTPYVDDQTFVQDLLVHMTSNYCIDTTRILATGYSNGGGLAGILACNSSLSNQFSAFAISSGAQYTNLTSANCPQNSSVPSTILTNTILQPVCSPGRRNVPMLEFHGDADGTVSYDGGPRRGYCLPTIPHWISDWSVRNGYSTANVATPLADGQVTRYEYGTANNQGIVTHYKIAGGKHAWFSQDTGSPIDATPIILEFLYRYRNYNALRYIPAPASPPVVSSAAASSTSAAVAPSFTASSPSAAFPSASNSSSIVWPTSYRPSAAAPSVSVNVSLSFNTSSSIAIPLTTTASSLPLIVSLPLNTSTSVAIPLTTAASSPPVNISLPLNTSSVAAVSTATINITSTIISAGTAGLSSTFSTISTQAPFANTTVPTNTTLPAPAATGISCPASNNTLYTDPSTGSTFEVQCNDGNTTTASLVNLDAITVEGATFQQCMSFCAMMAPTCQGVTMSGDTCYLERTSAGRTPGVQGARLVSHATR

SEQ ID NO: 2571 - protein, 551 aa, Aureobasidium pullulans
MKSVLAYFSAFLLGSVPLVQAYNKDHHQVYKGNDARLNKWRTFHVAGEEEHALSVQSTPTTGNATFRQYIDHENKDVGTFEQFYFYSTEFYGGPGSPIILFTPGEVNASAYTSYLTLNRTTGVLAKEIGAAIVCIEHRYWGYSSPYADLTTENLQYLTLDNSISDLTNFAKHVRLPFDYHRKSSPNRAPWVMMGGSYSGALAAWTASTQPNTYWAYWASSAPVESIIDYWQYFVPIQQGMPKNCSSDVSLVIDHIDNILLNGTTSEIAALKTKFGLEGLEHNDDFAAALQNGPWLWQGNQFYRNTGFFDFCDAVENVKPNTTNTTLPGAEGVGLEKALAGYASWFNTTYLPGSCASYGYDEWQGERNIKCFDTYDVTSPMYTDTSLSNAFDRQWVWMTCNEPFGYYQTGAPEDRPTIISRLSTPEYWIRQCPLMFPASNNTVVGLSRGATAAQVNAKTKGWNNYSPGLLYVNGDYDPWREASVSSDFRPEGKLQSTTKNPVVIVPGGFHTSDLVTQNAKANAGAKAAIDEAVGIMRGWVGEFEHGKHWFEG

SEQ ID NO: 2572 - protein, 730 aa, Aureobasidium pullulans
MLGFVTLALAGAGMVSARRLPHVAPRQFNNDTALSSSLPSYQAYINATRNDNSPVVLHIDTQDTSKRNATSPYLYGIMHEDINHSGDGGIYAEMIANRAFQGSNSIISTLDGYVGTYVTDSENDVVPFDPVMTAWAPIGHGVRMTLDILHPLSDALETSLQIDFPLNATGEVGFQNFGWWGFDIHPQQYNTSLWYLNNYPRNTQGNASDITVSFRSNVTGETWASSTFKNVTPTYIDFKQLETTLHPNATAPDANNTFAITFDGAQVAGQTFYFNLVSVFPETFKGYQNGLRPDIAQGFYDLNPTFLRFPGGNNLEGYSPAQRWKWWETLGPLQNRPGRVGDWNYYNTQGLGLLEYLEWTEAMNIEPVLAVYAGFSLDVYGQNGASYPPEQMPEILQEALDELEYCMGDNSTKWGAQRIADGHPEPFKINFVEIGNEDWFSVTYPYRFQIMYDGLKKAYPNITYISTAFNENAANYNISIPDGNMWDWHGYQEPSWFLANFDLWDNWQEETNNTGVTVLLGEYSVIQIDTPSGIVNYSYPLDVHVQYPRLLSAIAEGVYALGAERNPNTVRMSSYAPSLQNRNFTNWTPDMISYDALHDNTVLSASYWQQWLFAHYRGTETLPVTATEGEINPLYWAASIDEENNAIYLKVINTLNSTVSLSVNIPSAYSGVNGTSITASDLNSYNYVGNKTEVVPRPAEVESTASSANGSAWSWDVPKFSITVLQFDLC

SEQ ID NO: 2573 - protein, 428 aa, Aureobasidium pullulans
MLLLLCCLLVFFLGSHASPASNQAGGVTCVVKAASNGRDSAKVIRDAFKTCGKAKSGQRNRIVFENTTYTIASVLDTTGLKDVDIELHGTLSWNNSNLNYWLENSLPMGYQNQSTAWRLGGDGITFQGYGSGTFNGNGDAWYRFINGRSNYPRRPHQLTITGTTNSVFEGLIFLQSQMWTMTLIHSSNVLLQDIYVNNTSKTGAPTVNTDGADTIFANNITFRRWTVDNGDDAISPKANSTNILIEDSAFYRGSGIALGSIGQYDDTFETIQNVTCRNITSHRTKYGAYIKTWTGVNKGYPPNGGGGGYGYASNLTFEDFRLIDVQKAFSITQCTNFEGNQGDCDTSKFNIHDVYLSDFSGTIRGDVVTTLQCSAASPCRNIQLLDVAVINSLNNTAPRQYQCDSVKRTVGFNCTGPPDGEDNAFKKL

SEQ ID NO: 2574 - protein, 425 aa, Aureobasidium pullulans
MYASLLAALSVPVLALAQTVVTVPERVCIVEPCANGGDSAPAIIEAFERCGHNESPSRGKVVFRNETYNIHSVMNTTGLKNVDVDLNGLLLWDTNIPYWLNHSLPVGYQNQSSAWLFGGENINWDGHGYATLNGSGQAWYTFVNGTNNYPGRPHQITITGTKDSNFLGTRFLDSQMWTLTVIHSENVLLEDIYVNSTGNEPVGFDFSSLNTDGADTVYADNITFRRWSVTNGDDSIAMKANSTNILIEDCDFYMGLGVAIGSISQYDDTFEYIENVTARNIRSYNMRYGAYVKTWTGNSTGYPPNGGGGGIGYAANITFSDFVLENNTGIYAVTQCTSYNGASGGCDSSKFNLRDIRLQNWTGTAVSDVVGSMQCSGSSPCTGMEITGIDIVDTVNGTAPSQYLCDNLSSVGFNCTGPTWEENSR

SEQ ID NO: 2575 - protein, 631 aa, Aureobasidium pullulans
MKSSFALTGLMGATALGQALTADMIDSMGNNTLFTRWRPQNHFIAPAGWMNDPCGLMYDPTEDIYHAFYQWHPEHINWGNISWGHATSKDMISWTDVGSWEGTDALALGPAGNGSYDGLGIFSGTAQPVNMTGGIDGTLLIFYTSVSKLPTSWTLPYLNGTESQSLAMSHDGGKTWEQYENNPVIEGPPGDWNITGFRDPFFEPMPALDAILGQQEPHYYAVFGSGIKGVGPRMPLWSAPASNLANWTFLGSLFEPADNTSLGAVLPTGSYGFNFEVSGFFTLPDEDGHLHYFVNMGSEGGNVSFHESAHWALWNEGHVTRHANGSAQFTPISGGAGDWGNLYALTSFNDTKNDRRVQYGWAPEDITGGGGLFSAKQQGFQGALSLPRELFVHTVKNVVNMDGVLGEMGNSYLSQNLDGSFTAQTLGVKPLEDVVTGLRNGSTQHSWPGRTYNGSQTLVANGSAHMELSAVVSSATGPCGVRIGVSPDGREYTNIYYEPANNTVVVDRTHSSLIDGFANSSVIGYFYPYTIQGEYGNATQEPLVWDIFVDGSLVEVYINDRFALTTRIYPSMQSSTGVGIYVASGASATFDSIDSWSSLYNVFPERPLNSSSQLVWDTVEQTNNRTWWTGN

SEQ ID NO: 2576 - protein, 546 aa, Aureobasidium pullulans
MLRTSAILSSLLCAGSVFAQNGTTLSTLGTPIGAPVTGDYSGALRPQVHFSPPKGFMNDPNGLFVDADGLYHIYYQYNPTGLVAGNQSWGHATTTDGYTFQNQPVALFPPNNETFVFSGSAVVDVNNTSGYFPGQDNGVVAIYTLNNSTSQNQNIAFSKDGGYSFEPFEGNPVIDIGSTQFRDPQVFWHAQTESWVMVTVYAAEFAVGIYTSPNLKNWTHASNFSNHGLLGTQYECPNLVEMPVEGSDETMWLMFISINPGAPLGGSISQYFPGSFNGTHFEAVDPVARISDFAKDNYAGQFFSGIPGTEKRLSIDWASNWQYTNVVPTGNEGWRSAMTVFRQNHLKKLPGVGWDLVSTPFNISSQFSQVLASNSSLGNSSILLDYSTVPSSALYFEANVTGLTPSTLAGSLNFTFTSSISGENVQGGTVPGGATWVSRRNAGWGAENPYFTDKFSSNGVYSGSDNGTWTLSGVLDRTILELFVNGGEQSATLVFFPEYPLDTLRIGAANIPEGAGVSVAVWGLRDAWSGQANSDGLVLGNTTASA

SEQ ID NO: 2577 - protein, 852 aa, Aureobasidium pullulans
MHPKVLSRLFASLILTWTLGFVVVNGQSTTQPSLAQITSALASGSGSTSLGSALAEAGSTLESIISDTIAQLARWTTLILFPERYYSYGRSPDVYPSPQGQGSGDWSQAYSQAKALVAQMTVQEKANITLGSSETHDCSGFTGSVPRLGFPGMCLNDAESGVRTASKVNGYPAQLHIGASWNRSLAYDRALHLGQEFKTKGVNVLLGPVAGPLGRIATGGRNWEGFSNDPYLAGSLIAPTISGMQKSVIACVKHFIANEQETNRSPFLQGFLSGLINLNNSVSSNVNDRTMHELYLWPFYDAVKAGAGSTMCSYQRVNNSYGCQNSKTMNGLLKTELGFEGFVVSDWYAQHTGVASVNAGLDMVMPNSMYLDVNSFATAVKNGSVNSTRLDDMATRILATWYRFANLQNPGLNDAEARQAAAETTLFQGAVEGHVLVKNVNNALPLRKPTVLSLFGYDAPGGTNTSATSFQLKPNGKLNTQAYTSGKPYTDLDDLINSAQVLPAGFAGPEVALNGTLYTGGGSGAITPVSSISPEDAFRNQAAIDGTTLYADFTSQDPTVKAPNNPCLVFINSQSSETWDRSTLADIYSDTLVTNVASRCKNTMVIIHSAGIRLVDRWIDHPNITAVIYANLPGQYSGTSLTEIIYGRQSPSGRLPFTVAKNESDYGSLLRPTLPDRINPQYLQSDFTEGLFIDYKRFIQQNVTPRFAFGYGLTYSNFSYSGLQMSANGSAVTSSSPPGTVAGIAAEGGTTSLYDIIATVSIAVKNTGNVAAAEVAQLYLGIPGSGVPKVLREFEKQLIQPGASVTMTFPLRRRDMSIWDAVKQQWVLPSGAFNVMVGKSVLDIQLQGTLTL

SEQ ID NO: 2578 - protein, 347 aa, Aureobasidium pullulans
MFTKYFATAALAATTALGNSYQLVEESRGVTFFDNFDFQTDSSPTHGTSKYMPRAYAAQHKLIGVVNNNGSAGPSAYIGVGSTNVTEARLSIRLESKNSYNHALVLADIKHMPSGPGLWPALWMVNPTNWPAGGEIDIIEQVNNNPYNTATLHTSANCAITGDYIRSGQSDLFSGTLETPDCDVNSPLQSKNAGCGIRAPENDTYMVGNESCVHSTAGSGFNAQGGGVYATLWTSAGVSVYFFPREYIPSDIKANKPDPSTWTSKPQAVFSGNCCNFDSHLKDMKLVINTELCGDWAGNTWEADGAAAETGVKTCAEYVQNNPQAFKTAYWLINSISIFSNETVGAN

SEQ ID NO: 2579 - protein, 571 aa, Aureobasidium pullulans
MFRQLSIAAVALSLASSQVSAKPIQRRAAGDSSFDYIVVGSGPGGVTVADKLSESGASVLLVERGQATTGQWGGNNKPQWLDNSGMTVYDVPALDDQIWTKGGDFTNDIFCDDIVGGISGCVLGGSGAINSGLWWKPTSWDWDTMFPEKWNSTNMANVTDRVFSRLPGTEVPSQDGQLYYQQGADMLEGALDAANWTLVSANEVPNQKDRVYSNTTYMFQNGERSGPMSVYLGSAYSRPNFSLYTNAIVERVIREGSKITGVEISNTADDGFRGTVKANKAVVLAAGAFGTPKVLFRSGIGPRDQLETVRNTEGSKMIGEDQWIDLPVGHNLMDNINTDIVISHPDVVYYDFAGLWDHPNQGDVDSYLNGRTGMLAQSASNLNPMIWELLNGTDGLQGLQWTARVDTSLDINNDAKHNMVLAQYITIGQAARGRTTITPDLKMNVSTGVDVMQHESDQVAIAQGLDDMRNILKNVPGLEILSPAADVSSLDYVKSTTHLYVNHWLGSCKMGNDDGRDNGSSVVDADSKVYGTDNLFIADGSIFPGQTTSNPQAAITIVGERVAELILALNQ

SEQ ID NO: 2580 - protein, 1141 aa, Aureobasidium pullulans
MQLTSATLLVAGLAAQQATAHWPINAGKFSTCDNADTKCSTEQHKGYDWSGLQLGSSVTNYGANTFSGGWTCNSLKSKRDELTKRTFNNKCISGKLPSWGASGSSSKQGAGSLSIGCSGEKNKFSISEMHISSSYSTNVDCHYNMPDGSVCKHTVPCSAGGSIVKNTQCGGAISVSFSHGKGSSGSSSGSSSSQGDCDLNIHSVGFACGSGSSSTSLSLPSSVFTPSSSAVYSSSAFVSFSTAVPETTSAELTSTAPSFSIEYTSSSVVVSSSSVYVPASSSAPFPSGYQNQTASLPTVGSSSVYVPSSSEVSPVESSSSSSVVVPSIPVGTGYYPSASVPVGTGYYPSSSASSSVVVPVGTGYYPSSSASSSVVVPVGTGSSPSSSTIIPVGTGSYPSSTGGVYVNSTVVSSASTSSASSPAPSANCPGVVPSCLNTYLSSTGCADNADADCYCKSEDFINSVYKCIDAYGGSDENVSQAMSYMVGICAKAIPSNPAIVTAVPSSIDIKPSSSTVNPVTGSLSAVTSASSATDSIVYVTDVVKSTTTYCPAGQTISISGSTTVLTAPTTIPTVYTTQSTITASIISSVTGALPSGESAYETSPVETSSGAPSASETSPVETTPASVHVQVPHTVTLYSTQVATITSCAADVTNCPARTSLVPTGSTISNIWIPVTSAHETSPAETTPAASSGVSSGVSSGVVSSAVEVPSASKPASSAYETSPAETTSAAVSSGVSSGVSSGIVSSAVEVPSMSSPASSAYETSPAETTPAVSSAPSVPKTVTLYSTKIDTITSCAADVTNCPASSTVHSTSLIATGVTTVSSAFETGAVPATSSVPVVPEVQSTVIVTDVVKTTVTTCPVGETITSAGKTTVLTSASVITSQITVKSTISTTVPAQTQTVVSHESSSAVAAIPSSAEITSAPAAPKTLTIYSSVVATITSCAADVTNCPASSTVKSTSFYAVGTTVSSESVPAVTGPSEVAPATTAPAVVPSSTQPMTTITYSSVMTVPATYTAGESQGAPVPSSSVTSTIHMTLTVPQVQFITATINGKPSVGLSYPSAVPATTTPEAAATTPVAGAATPAVSAASSGFAPHSSTLASTYNTPALPTGSPISYTGAGAKVGGSFAGLALGAVAAILVL

SEQ ID NO: 2581 - protein, 472 aa, Aureobasidium pullulans
MFFSTNLLAAIAGVSTFCVEVSGALLPERDGVSSFVYGRQESTNTSTSWPYGPFSTQGRDIVNTRGEAQTFAGVNWPGSGETMVPEGLEWASIEDILSQVESVGFNFIRLTYAIEMVDQIYERNGSDVGLEIAMINGLGYENGTKVTNEIIAKNPTFNKDTTRFEIWDHIAQVAQSKNIFIHPDVHVGKAQWCCNNTDGNAWFDDYNFPVANWKRGLQYVAQWATKHNNVVSMSLRNELRRAINETAPTSTLGYNWVTLVGNYTAATDAIHESNPDLLVTWSGMQYDQDLSALIQGKNLNTAPCYKCDAIRDGLRREPIIFDLASHPWANKVVYELHLYSMSEDLDTGSCPIVFAELYNAGFNAIGMAPPPACNITQNCHPAVRNTPVIISEFGAAQDVTLLNNTLMNCLKDFTVQNNVSWAMWSLAGSYRIRSGGQGVGDTWALGNYNWTGWNYPEGVESWWKPWVSSMFD

SEQ ID NO: 2582 - protein, 458 aa, Aureobasidium pullulans
MRVSAAIAATILAGSATAAPTPSLLSSILGLLTNDLNSLLNSLGIKLQTNANIHGATVNYQQQCPFTIDTSVSVSTNVFSHDITWPLGVNGGNYIDWKTFKANGANLGGWLEKERTHDPIWWSQVGGDSAPDEWTLCQTLGSQCGPILEARYASFLNTTTIDQLASVGVNTLRIPTTYAAWVKVPGSQLYSGNQQKWLKIITDYAVRKYNMHIIVGLHSLPGGVNNLDIGEALFHDDWFYNATNLDYSFQAIDGVLNFIKSSGYQNAFTIAPINEASDNLSGFGSAAGLSDNATNWINTYINGVLKKIAVVDKRIPLQLQDCFKGASFWAPFYDASTNIVMDSHVYYFAAAGTYANYVNPAVCGQAQYIAQETKFPVFIGEWSLQAMYNNTLNVATRKTLFDTQRYAWQKYVAGGSFWTAVSYSTATVDGEGTQRDYWSYVDLIAAGVITKQTNASYC

SEQ ID NO: 2583 - protein, 2002 aa, Aureobasidium pullulans
MRTSFLSSIAGLAALAVCQSSTDGSSTSSSAFVSSSSSLVATSSSSSSLATSSSSLAISDSSSSSLVATSSSSSSLVTSRSSSSSLVSSSSSTVVSSASSSVTALTVATDASGQYTAINAAISAAQNSGIPTVVVKAGTYSEAIAVSGTQTVTVVGPSASSVAQNQVNVIASGSNGVVNIATSSTKGVTFKNLNLTNAATDGTAPAVYIRGSKHGFYNCALISGSTGVYFSSYGTALIANSYIEGVDKLFTNFPTVYVYGSTIVPTNSSALIVYAKGVAAGMMNAGNSTVVIDSSSVAQKAGLVNTNVFLAAANGNFTQVVYRNTNLGNLVASSGFHPTSCKYINFFGEFSNVGPSSYSANAISRSKVCDIQMTVDQANAFTIDQVFGYTFAGYNSFDTTWVDSDVLSVIQKSDSAQVAAVSSSVVTSSVSSTVSSASSLSTSSVVSGSISVSGSSSIASSGSVSSSGLVSASSTLSVSSSSTCATPTPSATLIVSQNATACQYGNISAAIAALPNDSKPYTIYIMPGTYNEQISITRNGKVTLIGETNFKNDYSQNQVKVQFSSGRLTSLSQNEQTPVINSKKTNDNSGLAMYNIDFINLYPQTANTAALAADFYGNNMAAYGCSFIGFQDTLLANKGVQVFSNSYVEGSIDFVWGFSTAYFYKCVIATNTKGACIAAQGRTVGVNSAYIFDSSYITYTSTYGSTFGASYLGRPYSNYSTVVYKNSYLDKHINAAGWQVWSTGNPQTSNVFLGEYNNTGPGAWVSGTARASFATNMTDDQVAAYSLASWVGDTSFIDQAAWNYETSWKFPASTTTSGASSTSSGVSGPTSTASINAHPDSGTVPPQYAVIVSADGQHNASFTNLTAALAALPNDNTNQTIFLYAGTYNEQIPSINRPGAVRVIGYTSGNPGQSYKDNSVTVTFARGLSVSPLPSGHSDAETATLATASNRISFYNINFINSDNLDGLEASYVTLAASIYGNDIGFYGCAFEGWQDTLLTGATAGYQYYESCYISGAIDFIWGYSKSYFKGCTIGAKKAKSAMTAQSRASASAIGGYIFDQTLFTSATDATVDLTGTVYLGRPYSAYALVVVKNSYLDDIINPSGWKVWSATDPRTDHITFAEFANVGPGAWQNNVAARQAFGNATLLTSDTYSLASVMDNTAWIDSTYWNSIVTPEPAVVNTTAPNNVTVSGSSSYNGTVPPTGAIIVSKNAIDGMTTYDTIQAALNAAPTSSKTNATIFIYPGTYNEQLIVNKSGTTIFMGYSDSTDDYSKNQVTIQQSYGEDTQGTGSDVDAATVYATGNYFYAYNVNFRNNNGTQQNIASLGFAVKSSKYAFMHGCQIYGNQDTLYISGNMFTFKTYIEGNVDFIFGAGSGYFLNSTISPNEDGDSITAAKRATNTTAAGFVFDQCTIVPAAGSSGFKNVSLGRPWNNFARVLYAGCYLDGSVGSAGWTQWSKSSPQTDGVTFAEYHNYGPGSSTCKRASFSEQLSDSDAAQFQLANFFPTTSWIDFSVVDVQPFTAGFGSAPAACVSSSSLSSFMLSTISSTSSSSVTLPLVTTQVTTTIIQKATTFTTLTQGDITSTSVTYVTENDGLTVTPPAVLKTSIIKATSVLTSTTTKAAKTATLKSTSVVIATVTASAKDVTVQQISTVSGETTVSGKDTTIKSTETDYYTVSVAGKTSSVKATSTVIATSTSSPKPVTITENLGSVVTVYQTSTLKGATVSSVTTVQGADVTSSTTLKASTVTISSYSVKTTTKGTTITASCVPTAAAARLFRRGLEARAAGTTTIFVSTTLTSYIKTSVVTSAGSTLYTSVTSTSTIGGTSTLKAATSTILSTSYATSTDLITESAAAATTTSVILSSSATTVTAAGSTVTNLAYTTVYSTVSLPASTYYSVATVKSTQTVSADAATVTSLKLVSSTTVVTAAQSTVTITNAADSTTTILTTLPASTATVYKTSSLKGSTVKVTVTPAPATKTTTVKSTSTVFSTVTKTAKNAPACTD

SEQ ID NO: 2584 - protein, 387 aa, Aureobasidium pullulans
MKTSAILAACASGLAVQAFSVPRIAQNAAQQVQGFMSPEQYLIELAPGETKWVTDAEKWALRRGGISFFDITDTPDLGSVLKSNAAVKFPEHTHYNSTVKSLARNLTKSNMHDHLETFTAFHTRYYKSEYGAKSSFWLLGQVNDTLAHAGALKHGASVKHFEHAWGQNSIIATLPGKTNKTVVIGAHQDSINLFFPSLLAAPGADDDGSGTVTILEALRVLLLDQDIIEGKQENTVEFHWYSAEEGGLLGSQAIFQTYEKTGRDVKAMLQQDMTGYVQKTLDAGEPESVGVITDFVDPGLTEFIKKVVTTYCDIPYVLTKCGYACSDHASASKAGYPSAFVIESDFKYSDNKIHTTEDKIEYLNFDHMLQHAKLTLGLAFELAFAKF

SEQ ID NO: 2585 - protein, 229 aa, Aureobasidium pullulans
MVSFKSFFCALMAATSVLAAPFDFLTDEVDGNATLAKRQSTPSAEGTHNGYFYSWWTDGGGSAQFTLGEGSRYSVKWTNTGNFVGGKGWNPGTGRTINYGGSFSPSGNGYLAVYGWTRNPLVEYYVIESYGTYNPSQGAQFKGSFSTDGGTYNVYVSTRTNQPSIDGTRTFQQYWSVRTSKRVGGTVTMQNHFNAWQKNGLNLGTHYYQIVATEGYQSSGSSDIYVQTK

SEQ ID NO: 2586 - protein, 630 aa, Aureobasidium pullulans
MASLATTATALLALAVPYASAINLKVSSSGGNASSPLLYGLMIEDISNSIDGGLYGQTLQNNGFQGDSPGLTAWTAIGSSTISQDNSSALSDALPSSLLIKSNGTSGTVGASNSGYGGIRVLPDHYANYFYVKGSYTGNVTLSLVGSDGGVLASTHVSVNSNSSAFGYYETYDMYAGKAAANGNNTWQFTFDASLATDGQLNLGLPQLFPTTYKGRFNGMNNEIATVIDEIGGKFLRLPGGNNLEGASIPDRWIWNNTIGPLIDRPGRQGDWTYPNTDGMGLIEYLYWCQDMSLEPVLAVWDGLVLADSGAISGDELKPYVQDSLNELEYLTGDTSTEWGALRASHGHPDPFHINYVEIGNEDMLNKGLDNYQSRFDMYYEAVHAAYPNITIISSVAPGSTGGNGSGINVPEGAYQDLHQYLPPKDFIANFNTFDNWDRSQPLLVGEYASTTFDNGSATIWTNMMGSVSEAVYMIGMERNSDVVKMACYAPLLEHFDRAEWSPDLIGFDATTGVTRSTSYFVQQMFASNKGDTILSVESDTGFGPVYWVASSAGSTNFVKLANYGGDEQNVTLTLDGKTSGSLAVLSGGQYESNYPGQENVKPVVTEVTGSNGTFSISLPGWSVAVLSAE

SEQ ID NO: 2587 - protein, 462 aa, Aureobasidium pullulans
MIRALLLALIPSALAISEWGQCGGTNWSGSGSCDAGLACSSVNPYYFQCVSGAAGPTSTSTSTKPVTTSARPTTTTSGAGTTLITSRTSTATSPTTSAAGATNAAGNFFAGRQLYANPFYASEIAAAIPSLPASLKPKASAVAKIGTFVWLDTAAKVPTMDTYLTDIEKQNAAGASPEIIGGFVVYDLPNRDCAALASNGELTVANDGLTKYKAYVDSIAAIVKKHSKTKIVLLIEPDSLGNLVTNLGVAKCQEAHDTYISGVEYALKTLNFDNVSMYIDGAHSGWLGWPANIGPAADLYASVYAGAGKPKALRGLVTDVSNYNGFDLASKPVYTESNPNYDEKHYINAIAPLLTAQGFPAHFIVDQGRSGVQPTAQLQQGDWCNVIGTGFGVRPNTNTGDALVDAFVWVKPGGESDGTSDTSAARYDAHCGYADALKPAPEAGTWFQAYFEQLLRNANPAL

SEQ ID NO: 2588 - protein, 453 aa, Aureobasidium pullulans
MISASASTLAAILALGHGVLGQQAGTSTAENHPPMSYQRCTTGGTCTTVNTNIVLDANWRWLHSTSGYTNCYTGNTFDASLCPNNVACAANCALDGADYTGTYGIQASGNSVSLKLKQGNNIGSRVYLINGDKYELFKLKNQEFTFDVDVSGLGCGINGALYFVKMDADGGLAKYPTNKAGAKLGTGYCDAQCPRDLKFIAGKANVEGWKPSNGDANSGEGNTGSCCAEMDIWEANSISTALTPHACSTNGPCTGNTTCGSGESRYDGYCDKDGCDLNPYRFGAPNFFGPGKTVDSKSKLSVVTQFITADNTATGTLTAIRRIYVQNGKVIQQADTNIPGITKTNQITDKFCKEQKKVTGDPDEFSEKGGLAAFGKDLDAGMALVFSVWDDHTANMLWLDSTYPVGSNKVGAARGTCATTSGKPSDVESQQANAAVTFSNVKFGAINSTYKAS

SEQ ID NO: 2589 - protein, 536 aa, Aureobasidium pullulans
MLFSSILLPALTLFTPLASAAFGLTSNTDSYVVDAGASNTLVVTVNKKSCDITSILYRGEELQYKSTGSHISSGLGSATVTGEVIASQYAKITCKTSTLTHYIVVKSGDSALYMATYTTAEPTIGELRFIARLNSKSLPLEYPFGAASTIAGSTSTVEGSDVFVVNGETRSKFYSSQRFIDDQVHCVYRDGSDPIHACMVLPNPAYEASSGGPFHRDINSNNVGDYTGLYFYMNSGHVQTESFRQGLHGPYAIVFSRSGIPAVSSVDTSFFSDIQVTGYVADSGRGRVSGTASGIGSSFQTVVHWYNTNNQYWTYANSGGSFTSPPMRPGTYTMVLYQTEFKVAETTVAVTAGSTASKNIASGVTARKTIWTIGSWDGQPTGFLNADKQLRMHPSDKRMSSWGPLTYTVGTSKLTDVPMALFKGVNDPFTIKFTLSAAQAGAATLRIGTTLAFASGRPQAKINSYSAAAPAAPVKIDSRGVTRGAYRGFGEVYDVKIPAGTLVAGANTITITVASGSSGASYLAPNFILDAIELFQ

SEQ ID NO: 2590 - protein, 696 aa, Aureobasidium pullulans
MAPIKQLAALTVAAAYLPYASAAAIAPSSLSNGQTSLTLLYQNNLNFTDDVNHISAILLDPSTASNGAAGCAALNETLIPQSALQAHSQDFINQLSYAFYAGRSTQDQKWHIASGQTVQVSNKGLKFAKAGPGNVLPVLCTQSSQSNTPSNAVASAANEIKISSSGNTFVGFRNKKSFRFQGIPFADPPARFAYSTVYSKTGQTIDATKYGPDCAQPYESSSSENCLFVNIQTPYIPKAGSKKNLRPVHFWIYGGGFTGGSGASSGSDGGQLASREDIVVVEINYRLTTLGFLAIPGTNITGNYGISDQVTGLDWVLKNIASFGGDPNKIVINGESAGAGSVRTLLGSPKAIGKFRGSIAMSNLGGGVDLGLTGNYATTYSSYLTPAQSYARSEALFEEIGCNQTTLDARISCLRATPAQTIVNAATVARYVVQDGVYVNTEDLDVYNRNGSAANVNTIWGIVANDGASFSTYPKTPVTSELAGIQAALGISQAEAQSIIDSGLFPLYNTGNITLDSFNVSQRVATDNQFRCIDQATVYAGVESGAFKTSYFYQMQRSAGGYDPNNLGGPPVEPGYPYGNPEKPYFKLHGSDMPWVFGNLNPLRDANDLKSVQLESGYFASFVRSLDPNPPANYLQVRGYTNTTQGVQQSGPWQPVTSDQGPMKLLDFPSVTADFQDLPQCAFLNYPISYYVNGGL

SEQ ID NO: 2591 - protein, 583 aa, Aureobasidium pullulans
MRNSILAASATAAIAQAASLDQVCTAAHVRNSLPENGTYLFYPSSVTANAVYNTSVSGQTFFPDSTFNYCNVTFAYGHAGKDDRVLQEYWLPSPSNFKNRWMSTGGGGFAINSGSNSLPGGIIYGAAAGITDAGFGDFTTNYDTVSLYANGTLDHDALYMFGYKGIRELTVIGREFTANFFDTKEKVYTYYQGCSEGGRDGWSQVQRFSDAFDGAIIGAPAIRYGQQQANHLFANVVEQTLDYYPPPCELQKIVNETIAFCDPLDGKTDGVIARSDLCQIHFDLNSTIGKPYHCDAIQASSLGFGFGSKRKRQIMGSTSYEPEQNGTVSAQGVELVRTILNGLHDSEGRRAYINYQIGASFEDAFTTYNTNTGAWELDIASTGGEWIARFINLVEASNLDTLANVTYDTVKEWMIQGWYMYEDVLQTTNPDLSAFHGGGGKILTVHGEQDDSIPTGSSVHFYESVRKTMYPKQSYNNSVAAMNDWYRLYLVPGAAHCSTNTLQANGPWPQTTMAQMIDWVENGNAPKTLNATAITGDMANWQLCSWPLRPMYKNNGTELVCEYDQASIDTWMYDFDAYKLPLY

SEQ ID NO: 2592 - protein, 575 aa, Aureobasidium pullulans
MHLLSLACTATSLLSLLPSPVLARSPKSAKYERIQHERRIEMFAAQKEQQQDQRLQKRANHAYLTNNTAPFAVNGSGLPEVDFDIGESYAGSMPIGNSTTDSLFFWFMPTTNPLASDEIVIWLNGGPGCSSLDGFFHENGPVNWASGTYRPVKNTYSWSNLTNVIWIDQPISTGFSTGNATATNEDIVATQFLGFWRNFMDAFDLKGRKIYITGESYAGMYTPYIASAMLRHNDTSYYNVNGLMVYDPSIGYDGVISQAPALSFVDQNRNFFPLNDTINAQVNNISESCGLNTFMETAMTFPPKGPLPPPPSTYDEVYDYGNCDIYDILFTAIFEINPCFDIYQLGQQCPLLWDSLGFPYSYDQFYLPDGYSQPYFNRTDVKKAIHAPLDVDWEFCLPGEENPFVGDDSDTSPPSGLQDGPLQHVIERTNNVIIGHGTLDFVLFANGTLATLQNLTWNGVQGFSEYPKNPFYVPYHDHPMDSMAGAGIFGSWVEERGLTFVLTQLAGHFLPQGAPSAAYRHLEKLLGRIEDLSEVSPYTTQRNITQPEEILGNGTAWGKREIDGIVRRGQVELKA

SEQ ID NO: 2593 - protein, 363 aa, Aureobasidium pullulans
MHLPSLLLAAGSASVVLSQPLTRLSQRASKLQFVGINESGPEFGEANIPGTYGTDYTWPDLSTISTFVNKGMNTFRVNFLMERLVPNKMIGSLDAAYLGNLTETVNGITKLGAYAIIVPHNYGRYNGEIITSTEDFAAFWKTVAAEYKDNDKVIFDTNNEFHDESSTLVAQLNQAAITAIRSAGATSQYITVEGNAYTGAWTWTTTQGTDGKTNGETMGSLTDTVEDKLIYQMHQYLDSDGSGTSSTCVSQTIGSERLQAATTWLRDNKKIGLVGEFAGAVNTDCEAAVKDLLAFVAENSDVWTGALWWAAGPWWGDYMFSVEPKDGVAYSTRSTVDFGTGVAEVHSSHSGDRDDGQSTTQKD

SEQ ID NO: 2594 - protein, 587 aa, Aureobasidium pullulans
MLFSPWLDTLTCLLAFGVSDIGATVLRQGFSNGPPPASELHHTGHHGSNSTKLHGGIASESTICSGIGRDLLLKGGNAADAMVGSVFCVGVIGMYHSGIGGGGFMLVRGADGEYEFIDFRETAPAAAFQDMYKNNTDASIYGGLASGIPGEVRGLAHLHQKYGKLPWKEVMQGAIKTARYGFPVTADLVRYMASATAGQTSNFLVEDPNWAIDFAPNGTLLRLNDTITRQRYASTLETIAERGPDAFYTGPIAEAMIETLQAANGTMTMGDLKNYTVAIRDPVEIDYRGYKLKSVSAPASGGVVLAIMKTLEGYNNMGDEAYLNLSTHHLDEATRFGYGFRAEMGDPLFVKGMDEYQAEILNATTAAAIRGRISDTHTLNTSAYDPKNLEILDTPGTSHVVTADSSGMAISLTTTVNLLFGSQLIVPSTGVIMNNEMNDFSIPGTKNAFGLEPSESNFVRPGKRPMSSIACTIVENPDGSLYFVTGSAGGSRIITATLQTLWHVLDQNMTAAEALKAPRLHDQLSPNYVSFEYAYDNATVDYMKSLGHNVTWVAPGQSTAQCLRVLNNGTFDVASEPRQLNSGAYAV

SEQ ID NO: 2595 - protein, 403 aa, Aureobasidium pullulans
MYFSTLVLASLATICLSAPSVSADQQPIGASEPNTISSSWTKELISLHRHLITTESISGNEYDVGKWLSKYLKDDDWTIETQKVNNDSSRLNILAYPGKVRNPDLLISSHIDTVPPFYPYKIYSNDSETIISGRGSVDAKASVAAQIIATKKLLAEKKLKKDDVALLYVVGEEVHGDGMRAANALELTPKTIIFGEPTEGKLATGHKGMLGFTINAFGKAAHSGYPWLGRSANEVLVKSLSALMQLGLELPKSDKYGSTTINLGKIEGGVAGNVVAQNATAQIAIRIAAGTPDDIGKRVVEVIKEATEEFKLPGHEDEEMFEIVFAGKGYGPVDINHDVEGFGTITVNYGTDIPNLEKLDGQKRYLYGPGSILVAHSDHEAITLTDLKTAVKDYEKLILHSFA

SEQ ID NO: 2596 - protein, 307 aa, Aureobasidium pullulans
MFAKTFALFAFTALAEASGSCPAIWSTIASDLSQSFIGSNGCTDLARGAIRFAFHDSASYSSKTQYYAPATGGADGSLLLSSVEITRDENNGLQSYYGFLQEKYSKYKSQVGAADLVQFAASVAIVSCPGGPKVPTVVGRKDTSTAAPDNLLPKAFGAGAAQQVLIQLFEDKGISQPELAALIGAHTASKAVAQEAYGVPYNGPQDSTPGQWDVKYYSDTDNHPSGVYSFESDVNLSNPNSTVGQTFQSFVNSQSKWNAAFAPAMAHLSVLGISQADQANFVDCTSAVPSGSNARMIRAAPINDRIR

SEQ ID NO: 2597 - protein, 367 aa, Aureobasidium pullulans
MKMRASELVTVTAFMSGLAAALPSSPSSPSSYNNLNYYFPRQTAPQYPSSFDPLSNNVLAVYYGKAQYNSNPSLMDLCNDSDIDMIVMGFIRQFNGPNVQPTFDIANCRTPSNPAANFTGISCPALAASITQCQSVGKKVMISLGGSNANLVLSSDAEAQQAANILWNVFGAGTATPNLRPFGNVTLDGFDFDFEGGSDTSYVDVLSANLQSLYSTASPARFISASPLCANNTIMPYDFYKYANFIWPRFYNANACKAGGKGFNNSVTTWSNFLIDVDSAIGTNYPRFYIGALGFENYNNGGGFVTPDVFGDLVEYTKNRVGKATFGGVSIWEGTDALQSKTADGSQDILNVAKEALLEPFTSDACD

SEQ ID NO: 2598 - protein, 374 aa, Aureobasidium pullulans
MFFLSGLPFLASLTSLVSAQYSNAINGTASNGTTTFNNPILNEVGADPWVIRHGDYYYMTYTTNTNITILRSSVLTDWDNADVKLAFDPPPGMNYSTDLWAPELHLIDNSWYIIMTADPNFDTPSPEIDMWCDFNCPAVHHRMYVLEGSSSDPWDSTYTLKSQLNTYDQFAIDGTYFQHDSGLYHIYSCWYRQYDAWPANLCITKMSDPWTVESNFTERQIISTPDNPWEKTPYGRPFNQRLSSNEGPQQLTNPTTGQQFVIYSAARSDNRNYCLGQLELIGDDPMNPSDWRKNNQGCVFYQNPKAEAYGVGHASFTKSPDGTEDWIVYHGMRDPANGWSARTIRAQPFTWNADGSPKFPRPGYGPYQVPSGQA

SEQ ID NO: 2599 - protein, 390 aa, Aureobasidium pullulans
MPSILSIASAALVCLSAATASPHKQPAQNQVDPFFYKGFDLSSLHILELGNVTYKDTARRNATRPAEDILGDGGMNTVRLRIWVNPEPGQYDLAYTLGQAQRFAKKGYRIYLDFHFSDTWADPNKQFTPAAWTTSSVSALGSDLRDYVKSTLIAFKKGGVDLSLVSLGNEIRHGMLWPTGYVDVDTAPTSARIANFTNLASLWSNARKGVDDAVKAGVKKPSIMIHIDDGWNKTLQLDWFGALTGTGKVKAEDWDVFGFSFYPFYGTAATLDNLKDTLNAVATKYQKPVHVVETDWPAICDGATAPELSDTSVPISPAGQTEWVQDIVSVVKGVTGGWGKGVNYWEPTWLNNTGLGSACQDAILFSADWSGWPNKIIGYSRSSVNMFAGK

SEQ ID NO: 2600 - protein, 414 aa, Aureobasidium pullulans
MLRLSQLFSLQASMRLTALATVASLTLTQTAYSQTTSSCNPTQQYSCPADPALSKSVNVDFTSGESDQFTASGLPTYDSNGASFTVAQSGDAPMLTSNWYIMFGKVEVKMKAAPGQGIVSSCVLQSDDLDEIDWEWVGNQQDQVQSIYFRKGDASTSGRGAAFHMDNPTEDFHTYTIDWTSTELVWQVDGKTQRALKATDAGDQYPQTPMLVKLGIWSGGDSSNAPGTIAWAGGNTDYSAGPYTMVVQSIAVTDYSTGKSYSYSDQTGSWTSIKAAGGSINGGSTNVDTSAPAITSVVSGAVPFEGTHRTSTSVSTPGIGNWRATASGMTSTVATTYPGLPSGWTVNGSGKVVPPSKATTGESLDPDRNPLNSDTDQLFSFDTPSYASPHQLQSFFGFSHGLPLVKTLPRDPAS

SEQ ID NO: 2601 - protein, 710 aa, Aureobasidium pullulans
MRRPLAVALTTLLSSSAAAVPYAEYILAPSQRDLSPVKVHHANGTVINAAGVTTSGSGGATFNSVSAVTYDYTKNIGGLVSFIVSSSSDSEQYIGISYTESSLWISPDGSDATQNIAIDETLWFKITGPGNYSVEPLHDRGGFRYLNVYHNTTGNVTISHLQTYFTAMPHFPDDGIGEYTGYFHSNDEKLNRVWYAGAYTDQLCTIPSTAGNSLVDLDATDPNTPTVWWSNSTLTNGSSAFTDGPKRDKLVWPGDFAISVPGVFLSTDDAITVKLSLQQLFASQNATTGALPWFAQPIYVFPENSFINFGKVVFSFNYHLFTLLGLHNYWIYTGDDEYLQQNWNRFKLALNYSLSFVDETGLANVTSSFDWLREGMGGHNIEANSILKHTLDVAITLAYAVNDTSHIASWTNSSAAIVSAANTLLWDSSASLYKDNETTTLHPQDGNVWSIISGVASANQSTDISGALAARWGPYGAPAPEAGTTVSPFITGFELQAHFLAGQPQRAIELMQFMWADFMLDDPRMTNSTYIEGYDTSGALHYPAYADDARISHAHGWSSGPVLALSTFAVGLHVLNATNWIAHPQPGNLTNVEAGFKVDHGTYSGNYSVTANGASYVLSTPPGTKGSLVLDTPGCNAIIKVTGVGSDVRGKHGKKFNWAKQVHGHKGATSNPWKCGVWGPSPPSHQDGSAGTITIDNLAGGNYTVDIVCS

SEQ ID NO: 2602 - protein, 281 aa, Aureobasidium pullulans
MKFTTALVTGLLSASTVVAAPGTAMRRKRADAAIAASRAGVLKAPKPFIAATNITAAVHGPENKHVSYSTNWAGGVLEGTGFKTVTGTFTIPKVTVPSGGSSRTLYSASAWVGIDGYSCSSAILQTGVDFSIQNGAVTYDAWYEWYPDYAYDFTGISFSAGDSVTTTVTVSSKSGGVATIKNNSKGTSVTHTFTGQTGALCQTDAEWIVEDFTQISSSGQESLVPLVNFGTVTFTGASATTSSGTKIGPASADVIDLIAANGKTVLTDVTVGSSTVSVVYG

SEQ ID NO: 2603 - protein, 390 aa, Aureobasidium pullulans
MKFFSLLAGAAALATSAVAQYTNSTPTGDIDHVTIFTPPRNYTVPRTLYARSVLLNQNCEEDNVILATWENYLYNNNSNPYFPIYQSYDGGHTWSERSRVYDQVNGWGLRYQPFLYELSEPIGNFTAGTILLAGSSIPDDLSETQLELYASTDKGYTWKFVSHVAHGGEALPNNGLTPVWEPFLMTYNNTLIYYYSDQRDPRYGQKMVHQVSSDLHTWGPVVDDIVYGTYDWRPGMPIVSELPLGQYIMTYEFYGAEEADFAVYYRISTDPTNFNASIGRPLIATDGTVPYGSPYNVWTPVGGDLGTIVVSCGNLGEVFLNHNLGAPGAWTKINTLEPASYTRSLLVLPGQEDILIVGGGVLGGEHNAVTASSVNIKPKAPAFAKCNAKK

SEQ ID NO: 2604 - protein, 224 aa, Aureobasidium pullulans
MHFSSLFVAASAFVTALAAPAAEPVTGNGMSSLVERSTPAGTGTNNGYYYSFWNAGGGSVTYNNKGAGEYSVSWQNCNNFVAGKGWATGSARNINFKGSYSPQGNSYLSVYGWSTNPLVEYYILESYGTYNPGSGLTHMGTVTTDGSVYDIYKGVRTQQPSIQGTATFNQYWSIRKNKRSSGTVTTANHFNAWAKLGMKLGQHNYQIVATEGYQSSGSADITVS

SEQ ID NO: 2605 - protein, 569 aa, Aureobasidium pullulans
MAIMEGWKDKMAWPRLIVFMVVVFLLLTTVRSVIGKKEAFNLPANGHPGNEKPEGDTKVNMWCPIAGPTTIEDGLTSSTEFAKNKDLLKQQVERLSAAVNVPSVSYDDNYEVDKDPRWYAFVTLHETLKSHFPRVHEKMELEKVHSYGLLHTMPGSSQDLKPLVIMAHLDVVPVPDPTRWKHPPFEAYFDGQWLWGRGSVDCKNNLIGIYSAMERLLEQDFKSKRTIILSFGFDEETGGFRGAKYLAAHLKEEYGENSMGMIIDESGSGIRTIDGVAYALPAIAEKGFLDIVLTLNTPGGHSSAPPKNTNIGIMSRLITAVEEHPFGPHIDEHNPFWGYLKCEVENSPKASEPWLREALEKKEDFADRLIDSRGDKVRWSIQTSQSVDIVNGGIKDNQLPETTVTIINYRVLPSDKIDDVLKTVADVLVPLANNHSIAVQGSGYSQIDRGFGVLNISSSNILQPSPLSPTGPDVGVWNIFAGTIRQVFENTGEKLSAKKVVPVGTISTGNTDTAHYWQLTKNIYRFSPRWEGTSEGVHTVDERIDMQAHLSGLRFYYELIRNMDSFVDN

SEQ ID NO: 2606 - protein, 261 aa, Aureobasidium pullulans
MKFSAIFVLASATAAMAANSTPALFARQSTGTTCSNGESVCGSGCYDPTAYICCGQAGQVCASGNYCASADRCCPIGANCDGQGTSTASGVSATAIQSGSTILGSSASSAAAATASQSSVSQSSASQSSASQSSSVSSSLASALSVSSSVSSSVSSAAASSLSSSLTSSASAASSAASSASSSMSSAASSQSSVASSASSSASSAASSASRSATSSAASASRSASSAASSASSAAATSSGAAVAGTATNFGLALLGLAALI

SEQ ID NO: 2607 - protein, 353 aa, Aureobasidium pullulans
MILTKVFQTLLALTAIKSSVAMPTKRDTKVGYLFTSFPVDDEAIYMHLSNGNDPLSYQALSLDGTAETQAILRSDVGTKGVRDSFIVPSQDGSKFWLIATDLLANNFTNDFNEATRFGSRQLVIWESDDLATWGEARLTPNLVNATAGNAWAPEAYWEPLVKAYIVVFASRFWPESDTDRSGPQPPNILMYVTTTDFVTFSEAKTYFNPGYPVIDATFIATPEQGPNVWYRWVKTEVDYTIFQQRSENGILGDWVNVGGASDDVRVTFANEFSNNEGPLIFRDNLDAKKFHLWIDENDLQTYIPATASTLDDMSAWVPDDRSGFPKDVKHGKVLAVDQQQYDAILAKYKVVGA

SEQ ID NO: 2608 - protein, 907 aa, Aureobasidium pullulans
MKSFGSTFASVGLVVLPLIASVISASNSTCPPAVDYTADFEYVKCRQDSYYGRILGRERKVIFRDTNTPQYCADYCGRSGYPWAGVEAGTQCFCGGQLDGGAITGNANCSTYTCSGDKSQKCGGAFFLQLYKINNPLPVEKVDGDVKRQPLCHTSPLCEHTVCDTSLPISERIGSLLSEMTLDEKIVNTVNAADGVGRLGLPGYDWWNEALHGLAQAPGVKFNSPNGSAFSYATSFPMAITTGSAFDDPLIGEIANVIGRETRAFANFEQCGYDFWTPNINTFLDPRWGRGQETPSEDSFHTQQYVKQLVPGLQGGLDHPEEKQIIATCKHFNLYYAETNRYGENYNATAQDLAEYFNAPFKSCVRDVAVGSVMCSYNAAYGVPSCASEYFLQDTLRENWNFNEPYKYVVGDCGAVEYIHTIHNFTDSPAEGAAIALNAGTDLDCGLTFGSYLNESIFNNYTTEARLNQALTRLYTGLHTVGYFDGHNRYANLSWSDVATEDAQALNYRSAWEGMVLLKNDGLLPLSASYKKVALIGPYANASSQMQGIYAGQAPYIITPLQAAEANWDSVQYAFGTGVNGSNTTFFSEALEAAKSADLIIYLGGIDDTIERETMDRKSLTWPGNQLDLVQQLSDLSKPLTIVQFGGGQIDDSELLANDNVNALLWAGYPGQEGGNAVVDILLGKQAPAGRLTTTQYAASYVGEVSIFNPDLRPNGSYPGRTYKWYTGKPVLPFGYGLSYTTFDLAWCGKPLKQSYRIRDLFNKRQHHGAKRTPLDTLPYVTLSTTVSNTGNLTSDFSALLFLSTSNAGPAPYPNKWLVSYARAHGIAPGKSETINLDISIGSLARANENGELTVYPGKYRLAIDNDELLKAEFELVGEPVIVDRLTRQGVYEYTVPVHYNASANLV

SEQ ID NO: 2609 - protein, 400 aa, Aureobasidium pullulans
MKGSSLMAAGALFGSASAGVHKMKLKKVPLSEQLEGANIGEHMQALGQKYMGVRPQKHADEMFKETSMHAEAGHPVAVSNFLNAQYFSEIAIGNPPQEFKVVLDTGSSNLWIPSSDCGSIACYLHNKYDHSDSSSYKKNGSDFAIRYGSGAVEGYISQDTVQIGDIKIKNQLFGEATQEPGLAFAFGRFDGILGLGYDSISVNKIPPPFYSMIDQDLLDEPVFAFYLSDTNDKEAESEAIFGGINKDHYTGELTKLPLRRKAYWEVDLDAITFGKESAEFDNMGAILDTGTSLIALPSTLAELLNKEIGAKKGYNGQYTVECSARDSLPDLSFTLTGYNFTIGPYDYILEVQGSCISSFMGFDIPAPAGPLAILGDAFLRRYYSVYDLGSNSVGLAKAKA

SEQ ID NO: 2610 - protein, 409 aa, Aureobasidium pullulans
MFSAKIAALAALLPATAFAASIVGNGSSVLSNGKYEISSEGIRAQFIPYGASITNLFIRDVHGIERDIVLGWDNATYYTEDKKHPHLGGVPGRYANRIKNSTFEIDGNVYHTDANENGGLDTLHGGSNGWDWRNWTVSAHTTDSITFSIVDPDGAEGFPGEVISYVTYTLTPYEWHFKMIAIATTKKTPIMLSSHVYWNLDGFQNPTDPTVNNYTVHLPYSGQRVAVDGILIPNGTILPNEKGGVFDFWSSPKKLGANLTSPDLVGGCGTNCTGYDTCWLVNRDQNGPYDWRESGPVATVASPFSGIQIDIFTDQQAFQIYTCPGQDSTQSIKETQGFFNQTSQPRVVQKYGCMVMEVEDWIDAINQPEWQREKKNIFGPGDDPYVLQATYKFSLNKDLAATYSNTSSY

SEQ ID NO: 2611 - protein, 778 aa, Aureobasidium pullulans
MVRLSTTSLALAGLSIAQAQSNSSLVNAIYKDASQSVDARVENLVSLMTLEEKMAQLMQGDISNWLNTTSGEYNQTGLEFNFENRGGMFYVGYPITWDWLAEGIKVGQDYAVNNTRLGIPAIVQTEGIHGFLIGNATIFNSPIAQACSFNRELQRQMGEQIAIEAATLGVTQLFAPLADLARELRYGRVEETYGEDGYLAGEMAYNYIVGCQGQNVSAMVKHFAAYSEPEGGLNTAPVHGGERELRTTWLPPFHRAIIDGGAYSIMSAYHAYDGIPAVADYFMLTEILRNEWGYKYFVSSDAGATDRLFKNFLTCGVNDFECVTEQCLTAGNDVEMGGGSFNFRSIPQLLGNKTIDISVVDEAVARVLRVKFQMGLFENPNPAAPKDQWNSLINNAAAKKLARDLDAESIVLLQNPNKTLPLSKTDKIAVIGPMASGFMNYGDYVVYQSQYRGVEYLQGIQNAVGPSANATVSYAKGVERWSTDESGIPEAVDAAKKADVAVVIVGTWSRDQRELWQGLNATTGEHIDESDLGLVGAQRALVKAVIDTGKPTVVVFSSGKPLTEDWISNTTASLVQQFYPGEEGGNALADILFGKVNPSGKLSVSFPHDVGTLPAYYDFLNSGRPTYPGYVGGDGNLYFGSSYILNTPVPWFPFGYGLSYTSFDYSNVTLSSSQVSATDSITATVHVTNNGTYDGAEVVQLYVKDLVASVTVPNIQLKGFEKVFIKAGETAEVVIPLEISDIGLWNKSMDYVVEPGNFTVFIGSSSADFRTNATLTVV

SEQ ID NO: 2612 - protein, 394 aa, Aureobasidium pullulans
MRVAAPSLALALAQTSVAATVPQLEARQSACSDVHIFLAKGNNEPYPGRQGKLVNAICDGLDNCDYEDILFYNPVESSFCASVEEGVANGIAQLSSYNARCPDTKLVISGYSQGSQIVSDILGGGSGTFFQGCTTKPSPNLDVNSQVGKKVVAVTTFGNTRHTANQPYNQFSGSSGNGIFPRPAYQLANLATWTAKYHDYCVAEDPICAGGDNVEDHLNYFDLYSEVAASWVKDQVKAADVVVSSTIVSPSSTFTSVATVPTDKAVPTTFSYSNNTATAPQVTNSAALSSIQSEVLPIPTADTTVTVTVDCASVDTSAIASWTSAYAATAVVSQSVAASATGAAATTGSSGSKSSSAPNGTHTLMPYTGAASSMSGAVTGSLAIVLLGAFAMVL

SEQ ID NO: 2613 - protein, 498 aa, Aureobasidium pullulans
MRSKSNIAIGLAATGSLVAAAPCDLYKNGGTPCVAAHGTTRALYDAYTGPLYQIKRGSDGTTADISPLSAGGVANAAAQDSFCKSTTCLITIIYDQSGRANHLYQAPKGAFSGPDVNGNDNLASAIGAPVTLNGKKAYGVFVSPGTGYRNDEVSGTATGDQPEGMYAVLDGTHYNDACCFDYGNAEVSNTDTGNGHMEAIYYGNNTIWGTGSGSGPWLMADLENGLFSGQSPAQNTADPSIYNRFFTGMVKGKPNQWALRGGNAASGALSTYYSGARPTVGGYNPMSLEGAIILGIGGDNSNGAQGTFYEGVMTSGYPSDSVEASVQANIVAAKYATTSLNTAPLTVGNKVSIKVTTPGYDTRYLAHSGATVNTQVVSSSSATALKQQSSWTVRTGLGNSDCYSFESVDTPGSFIRHYNFVLQLNKNDNTKAFKEDATFCSQTGLATGNTIRSWSYPAKFFRHYNNVGYIASNGGVHDFDSATGFNNDVSFVVGTSFA

SEQ ID NO: 2614 - protein, 836 aa, Aureobasidium pullulans
MKHSILLLGLSASTALANIYFPKVQPTCNSEDLSFSGCLKGQFCQQNNTCTAVKHAWPMSFQDHGKRGLFKHRAKAPNYSQDGKCGPNNGNLLCDPNSTAYKGTCCSSYGWCGDTPAHCGSGCSSGCSSSSAVVASTIPTTTINRAAPSASGAAPRDDGRCGPEFNNALCDAKGAYGGCCSSYGYCGNTDGHCLTANGCLSGCKDAAPTSAVPTSAAASSVAPSNIDSAAPSSTTGEPVISAATSSAGSAPTGVVTTDGTCGATYENTICGDWKQGSCCSMYGYCGNSTAHCGDGCQSGPCLNGAVVAAPGPSPAPVNANPGRFDIVGESGVPAMHAGLLPNGKVVFLDKIENYTNIKLPNGQYAYSTEYDPATNKYTALAYKTNAFCAGGSFLANGQFIALGGNGPLDFIDTTVGDGFDGIRYLTRSSSDASLDGQDWSEPGNKLNTKRWYPSVQTLPDGRLFVASGSLNGLDPTVPANNNPTYEILDKNGKSSGVSVPMEILVKNQPYYMYPFMHQLKDGSLFVFVSKSSELFNVNTNTTVRTFADLPGDYRTYPNTGGSVLLPLSSANDWNPDIVICGGGAYQDITSPTDPSCGRMQPLSTNAKWEMDSMPQGRGMVEGTLLPDGTVIFLNGGNEGAQGFGLARDPTFEALIYDPAKPLGQRFTTGASSTIPRLYHSVALLLLDGTLMIAGSNPVEQPVLKPTTTDPYVTEFRVEIYTPPYLQGDNAKKRPTAITLSSKSLVANSQTFTVKFTAPTGAKAVKVALYHGGFVTHSVHMSHRMAFLDTAGWKAGATDQQITVTMPPSANVAPPGPYVVYVVVDGVPGVGQFVQVS

SEQ ID NO: 2615 - protein, 465 aa, Aureobasidium pullulans
MKKSGFVTLFLSALSLLAEATGSENYDFQTLSTAGRALAGNGTVEIDLNGKYVTENGMAYFLDILVGTPGQMQSVMIDTGSSDLIVTASNASACITIWGCAGGTFDPVKSSTFGTVTPDGLYKTYADYSRKVGDYVTDVTQIGDVPMTGAPLGLAYYTKDFTGVNFGIMGLGYSSNLTGNEAVEPDEQSYIPTFVGTLVQKGVVASRLFSLYLNQLGERGSIIFGGIDVDKFRGPLTTLNCLADNDTVKDFYLNLEEVTVQSSNGGSQSLMRPTGQKPYPVLLDTGRLDWSVPTDVYEKITEAAGAFEANDTKTEREWLEKPCNDLDRGGINAPHIQLTFSGNGSNTATLDLEMADLFVPRLNQDGSAMTNDVGQALCELIVRDYGSPKGLDQEGGVAIGNVVTRTGYFVFDLDNGQISMAQANFAANSSNVIHVEAGADGLKKAFDGLIAETQTNHVAGQPGRW

SEQ ID NO: 2616 - protein, 341 aa, Aureobasidium pullulans
MFRSSAYVLLLLYTVVSLVRCDPFNDQISLSKRTTIGLAITANFPDPSIIKVNGTWYAFATHTRGTDIKIQVARSPDFENWSIIRNVDGSQFDALPVLPAWVRMANYLTWAPDVQQLDDGSFIMYYSATAAARPDGSKHCVGAATSPTILGPYTGLADALFCPLSRGGAIDASGFKDRNGKRYVLFKVDGNAVGNGGACGNTVLPIVGTPLMLQPVAADGHTFTGNAVALLDNNGPADQGILEAPVLTRSRAGVYFLFFSSGCFATSGYTVSYATASNLTGPYTRADGPLFRTGDGNGLKAPGGMSVWGDNRHMVLHANYGNGRAMYTTFIALKGTEVITM

SEQ ID NO: 2617 - protein, 595 aa, Aureobasidium pullulans
MYLLHTLPLLASWVAYAAGSAAMKRQASSTSSAAGSATTLTPDDADTECTNGPHSRACWGDGFSIATDFDQKWPDTGKTMPYTLDITNTTLNPDGTGDRLVMLINNQYPGPVIRAQWGDWLEITVNNKLPNNGTGIHWHGIRQFETCDQDGVPGITECPIAPGTSRTYRFHCTQFGTSWCVQYGVGTLGTLVIDGPATDNYDEDLGPFALTDWYDETAFFNSPLARTAPPQPYTGLVNGMNVSPDGTKGKYYNATVKSAKKYRLRLINTSVDSAFMVSLDNHPFTVITSDFVPIKPYVAERVFIGIGQRLDVIIEANQTASNYWFRADVPAGGCGSNANPKGIRAIIHYDNTTFGNPTSTAWDTTGANADRCTDESYNSNKLEPYWDSFVPSDALTANPTLLSVQAQEAGLTTDNKTIFRWAINTTALNVDWDRPILEYVQEGNTSYPAYENLINVPDVEWTYWVLQEISTPGGIPLNIVHPLHLHGHDFYVLGAQGNSVYTNALSGQLNFENPPRRDTAMLPAGGWLVLAFETNNPGAWIMHCHIAWHVADGLATQFLETPDRIKVDPSFNEICSAWRDYYPEHAVYLKDDSGV

SEQ ID NO: 2618 - protein, 369 aa, Aureobasidium pullulans
MVQFSSLAVAALLSGAAIAAPTIQERGSCTFSGSSAAANVLKQKKSCSSIIISNAVVPAGTTLDLTGLNAGTTVTFQGTTTFGYKEWTGPLVSVSGDKLTVIGASGSVLDGQGSRWWDGKGTNGGKKKPKFFYAHKMTNSKIQNIKIKDSPVQIFSINNAKQLTLTGVTVDNSAGDGENKGHNTDAFDIGSSSGITISGANIHNQDDCVAVNSGSDITVTGSTCTGGHGLSIGSVGGRDDNTVSNVKFTNNKVTNSQNGLRIKTVYGATGKVSGIEYTGNTLSGISKYGVVIEQDYENGSPTGKPTNGVPITGLTMNNNKVGVTSSGTNTYILCASGACSNWKWSGNTISGGKKSSKCSGIPSGSGAAC

SEQ ID NO: 2619 - protein, 802 aa, Aureobasidium pullulans
MYRPLNTIAAALTAIGLAGAQNSSWNHELYTSSPPVYPSPETAGIGWETALAQAETFLANLTLEEKAGLVTGSAGPCVGNIAPIERLGFDGLCLQDGPLAIRQATYASVFPAGLTAAASWDKGLIYTRGLYMAQEFKGKGANIALGPVVGPLGRHGRGGRNWEGFSPDPYLSGVAVEQTIWGMQSTGVQACVKHYIGNEQETQRNPSTRNGTTIEAVSSNIDDRTMHELYAWPFANAIRSGVASVMCSYNRVNGSYGCANSKTLNGILKEEFGFQGYVMSDWGATHSGVASINAGLDMDMPGTIGFRAGGNSFFGGNITTAVNNGSLSEDRLDDMIKRIMTPYFHLKQDTDFPPIDPSEIPLNSFFGAAASTVAFPLGSVANVDVRENHATLIRELGSAGTVLLKNVNGALPLKAPKNIAVLGNDAGDILNGEYFSAAPYQSNTFGYEYGTLPVGGGSGTGRLSYLVDPLTAIKARAAQDGSLVQYILNNTLLSTPRGLASLQPTPPDVCLVFLKTWAEEGEDRSTLLADWNSTAVVESVASVCNNTIVVTHSGGLNILPWAENPNVTAILAAHLPGTETGNSLVDILYGDVNPSGRLPYTIAKTQEDYAFADITNSTALVTTRDPNAWQSDFTEGLLIDYRHFDYYNQSVQYEFGFGLSYSTFDISSLSVSKVYGGYNISSTPPPAKIIPGGNPTLWDVLYRATVTVSNTGDVAGATVPQLYLSLPQVPGEDPTPLKVLRGFEKVSLQPGQKTVVNFDLTRRDLSYWSIYQQDWVIAGGEIGVSVGLSSRDIKATSSIRVL

SEQ ID NO: 2620 - protein, 336 aa, Aureobasidium pullulans
MPVFKHFLLASVTLSVGVSAAPKKTKFNWHDTKHVIAFGDSYTYVQGTAGRQNSTFIGDYFNFSFTEEELLHNKIVQNQTATAEGGPNWVEYLTGCGLKPGLTSPLSCKTQLWDFAFGGADISTKYTPRHHNYTVMLEEQVQQFLTYAQPTLSKIVDPSKTLVAFWIGINDINDSANYAVDFPSFYDQLISTLFASVQSVYDIGYRNFLFMNLPPLDRTPGNVLKATPSPNTTMINWWDSSLTSHMHTFAANNPSANPFTFDVNTFLNNVLDHPDKYNIKNVTGYCASYNQPYINQAPESYGCLPLDEYAWFNNGHMTSHVHEILAKEVAQFLKKQ

SEQ ID NO: 2621 - protein, 739 aa, Aureobasidium pullulans
MHPTLALTVACLPAALVAASNISSNGTTVPDFHLPPQNLTIYGNNSLFAQWRTKARFRPSSNHIGDPTAFWQDEQGVFHVSGLYSYLRGPNISITSSIGSALTSDFLSYVDAHNYTNSSLFVNGVSIGPGNENDPLAVFDGSVIPKGYKGLPTLIYTGVHYLPISWSKPYIKGSEVQTLAYSEDNGTTWIKPDIEPVIPGPPEGFNVAGFRDPWVFQAPQFAKLLNDTPETWYLSVSSGIRQVGPRLLLYRQNTSDFTSWEFLGPSVSAPVNTTFSAGNFSGNDGSNYETSNTLFLDENGENLEDGVNFVTMGAESGRETHSFHYSLWKMGKFVRSSVNESVILEDHATGVIDWGIGYACTTMPDYKTNRRLAFCWSNDDFNSTISEQVGYRIGSSGVYSIPREVYYKEIPGVVADDLAAENGYWSVATEYLNTTLAKDGVALAKANGNDTVILATLGCKPAREILGFRKHANQSWTESDFDVDVKSIKSNCSGVEFTKEEGVTRAFIPFQQSPHSRHWELQATVDIPESSLRNEEYEDFAAGFTLLHSSASAPSNYSVDDAAMLYRPSNETFMITREVALGRDNVNTDPEMGKLRLWNISSTNTEGKQSYAIQSLNIRAFMDGSFFEVYVNDVLTISTHLYYWYKDSTRMGFYLQFPDTLANSTLDTSVKFSNISVWEGVPNVFPKRPTKPAELIDNGVGFVQPPNNPNVPLTYDGVGAPPLPPAENLPYGIDLSTVE

SEQ ID NO: 2622 - protein, 557 aa, Aureobasidium pullulans
MRFIGSSTILLLYAHLATADFSSAGQLFQLSGQDTVNNAKLSWQAVAGASIYEVEQRSGDGDFYTVGTTAGNTHDVYDLPLNQPLDWRITAKNNQTTIDQSALVSLTPFSPSADYNIYDNTIPSDALLKSELVSNKTYYKYDYEAYSNGSFSRFVEKTSSDGYTYTGNRTVLTGTILCASANYSCKLERQQFLKHPDGHFIMWAHFERSQDYALGQVAVAHASPGGELIFDGAFQPLGHDSRDMTFFADGEDAWLISSTNTNTDMDIYSLTKNWTAVDELLVQVNKAAYREAPAVVKQNGWFYLFTSRAAGWLPSQPQFIAAKSMAGPWGAAVDIGNTATFSSQSGVVESLHSVQSFMLADRWSANWPIAGGPNRQLALPISFSGAEGFAAYHFYPTVKYSDQVSEAGQGIFGVQEGKILSVGRPSSSNAGTANITLANDGTQDTPNAFFTPSQVPFWYQIDLGNASIVSRVELSTNMVQGSETYYDFNVTGSTDGSSFSLIGSKHDNVDVGFVSVASQSQEKFRYVRLNVNSIENAHNGNEADWARGISEVTVYGQ

SEQ ID NO: 2623 - protein, 1399 aa, Aureobasidium pullulans
MRFSKISALLCAVGVLAAPSTHEARDLAVSPDGKCGGASGQTCLNSYLGDCCSKAGTCGEGAFFCGLGCQKEFGACIPTYKGKLVSQNGLCGHDVTCKGSKFGDCCGSDNWCGSSSDSCGTGCQEENGSCGFTWPWGSKKSLVSRADPNPTCPKSNNTIYTSETGNQYNITCSLDHSGGDLKMVWVSSNKIADCLAECDATEGCKAIAMSGTACYMKSKIGTPVKSSNVRGAVWVGKVDSSASSSVSSTASATSGTSSSAVVSSSTSLISSSTVSYSNSSSTGSSSSAFPTSTSPTCPAANNTVFIAESGATFLIECYVDYSGGDLKSVNIGSNRIADCVNACDATDGCIDISMSGTACYMKKKLGKPTTNKGVRGARKIKDAPTSSSSSSVAPSTTSSSVMSTSSSFSPSTSSSASSTSSDAVSTSSKVSSSVILTTGVSTANATSSHTLTNSTVSIPATSSSSVISSSAVVSFNSTSSKVSSSSFSSSSISSSSVVVGPTAPIGTGASSGVPTSLTSGAPYGNGTSSTVSAGPTVPITSEDSSSTVSSTVASLNSTSTVGSSTSTILVNNTSTVVSSRTSIIGPTIPIGTGPSGGVSSSTTSGAPYGNGTTSTVSVGPTVPIGTGISFSSAILVNSTSSTITVPIAVGPSSGISSSTTSGAPYSNGTSSVLPVGPTGTGVSSSVITSKTVIVSPIGTGASSGVSSSTTSGAPYGNGTTSALPVGPTGTGVSSIITSSSTSSASNSSISLTTSYNLTSSIASTVLTMSANSTVSAPLTTAPIVTGPSTAISTSSGRYTNTTSSALTTSSASTTYDFNNWGGIKSDHPVATNTTACSRKPTSTATCVRCEGQPGTDKYCGLTINDDSYAVVPKTCNQVEYSLDLTECTVAPDGVSRKALCINGQFPGPLLEASWGDEVIVHVTNSMTRNGTSIHWHGIRQNHTNEMDGVVGVTQCALAPGQTMTYKWIAESYGFSWYHSHLTLQAYEGLFGPMYIDGPKSADFDVDAGHLIINDWSHIPVDDMYNDAQVAGVRTMDSGLINGMNINPLAKGDITGARYTVPTEFVPGKKYLFQLLNSAIQSTYKFYIDGHKFTVIAADFVPIEPYETTVLTINIGQRYEIIVEADQEVGDYFLRFDNQNACASTINSDDIRGIIHYAGGPGGTPNSTAYTYPRKDNGVGGILGTCEDEPLDKLVPIVKKTVSSPHQTVQHDVAVSNSNEINLYRWYLDGTTFQANWDDATLYNIVNNDTIPTYSGDLAIEASLGEWVYMIIESPIPLGHPIHLHGHDFFVLAAGYGNYGSGTALNLDNPPRRDVAFMPGDGPTGQGGHLVIAFFTDNPGVWLAHCHIGWHVAMGFALQFIVGKEQIKDTVSDTCLLNDVCTTWRPWAQEKGIYVDDSGV

SEQ ID NO: 2624 - protein, 402 aa, Aureobasidium pullulans
MQLLQILATATALHSLCEAVPLTTADVKDKKTFTLEQVLNTSSIIRTPAQKLLHVYAKYAKAGASAPVAVRKAAASATVATVAASPEAYDVSYLCPVTVGGKTLNLNFDTGSADLWVCSNLQPSSQRSGHAIYTVNNAKLMDGYTWDIEYGDGSGASGKVFADKVVVGSATATSQAVEAATSVSDGFVSDTNSDGILGLAFSSVNTVMPYSQNNFFDTVKSQLAKAVFTADLKKGAPGSYDFGYIDTAKYTGSITYVNLNSNGGFWQFSAGGYAVGSGAKVTKAYNCIADTGTSLMLLPDFIVNAYYKSVKSAVYSDYQGGWVFPCNTNLPSWSAIIGGNKFTVPGSYLNYANLGSNMCFGGMQSNSGIGFSILGDVFLKSQFVVFSQMTAKPQVGFAAKKL

SEQ ID NO: 2625 - protein, 561 aa, Aureobasidium pullulans
MRAPSLLLVAVSTLLAPTVLAVPSYPQPPPPPQQPLHRPAWRSVTDAIVRNIWSPPVQSRPEPAISALPHPKHSGDVVVRFNISNSQDATSLADAADTLFLDLWEYTDDWVDIRLQGDLLPSLLGLLPSSLHRAHSLLMDDFSLQHAISDTYPSSRSARLLQPNSPTHHSAFGPKLGTSSSENIFFNDYQPLSVIQPWMRLMASLFTTHVRIINIGTTYEGRDIPAMRIGVHPTNNDSPTRRKTILITGGLHAREWISTSTVNYIAYSLITGYGKNHVITTLLEEFDWVFVPTINPDGYAYTWETDRLWRKNRQQTSLRFCRGLDLDRSFSFKWDGANTRSNPCSESFSGSAPFEAVESKRLADWARNETENNNVDFVGLLDLHSYSQQILYPYSYTCDQSPPNLENLQEVAAGLSKVMRLSGGRYYQSAPACEGNVGLVSTGDRQVFPRFETGGGSFLDWFYHDLKVKYTYQVKLRDRGTYGFLLPRDHIVPTGKEVLDAVIYFGKLLSGQLDLTATEEEQVELKQPLQQDEENMTAIDVDGEVEDDEDVMVELRRRSRI

SEQ ID NO: 2626 - protein, 369 aa, Aureobasidium pullulans
MFLNTRSLFVWCLAALLEAEAASVSSKPKSIVLSESAPSNAGIPLDSFVSYSFELSSWPDFAGNLSYPNKFSYNLLNNIGNLQGSLPIARVGGNTQDIAIFDASQKTGLLGIVRPNISSDYPTIITIGPSFFESYKTMPKGTKYSHGFNLGANSSAARTATFASAAYACKAIGSDLAYWEYGNEPDLFVSSGYRPHNYTEAEYVEEWLNGTTAISSAVKAACPSLANTKFMAPSFAGVGPANDFFTLDPVLAWKNGLDQNDNIGLISSHNYMGVSTSPGITLQGTLMNHTNVVAKAGDQLREWAAIKALGNGLDPDVPFILGEHNSLARQGRPGLSNSFGAALWGVDWNVYLASQNISRSHMHQGTNYR

SEQ ID NO: 2627 - protein, 339 aa, Aureobasidium pullulans
MLPKTVLSFIVLTTSGAAASSACKGKHVQIQPPANALVVDASGQSANSFTTVNAAVAALANTTAEQYLFLMPGTYSEQVYVPKLAGPLTIQGYTCDSRSYAENQATITGNLSRTTPGLTSNDQTATLRLWTSNVKLYNLNIANTFGQANTNGQALALSAQNTNQGFYGCRFEGYQDTIYANEGRQVYAESFINGAVDFIFGLRARAWFEQCDIETIGPGFITANGRDAENNTSFYVFNQCHVNGTSGVASTVLGRPWRQFSRVVFQRSYLGDVVKSVGWERWDAVQSLANLYYGEYKNKGPGAVGPRANFSMELTAPVKLETLLGKQYKKEWWVDSTYL

SEQ ID NO: 2628 - protein, 578 aa, Aureobasidium pullulans
MRFSPSFALTASLAVANAAAIVPSERSLGKLISEIIVLVKEITTIPIVIDQQINKNTVISTNGVTCKVTNAPTHLRTTLYKTTSVTKSSTKTSTSTVKNGNGQSTATSVVTSTSSSVAPVTTISVASTSSSVSSASSASSHTSASSVVSVNTSAAGTGLNTDLYTATSTCPQSSTTVTTVVTSTSTGASTTKVVSSTGTTTVPASTTSLASGEWTDWTIYSANGVNLGNWLEIERSNNQYFWDSYVNGSAVTDEWTFCKTLGNECGSVLEAHYGSAVTTETIDKLAGVGVNFLRIPTTYAAWIDLPGSELYHGNQQTYLKTICDYAISTYGMRVVIGLHSLPGGVNGLDIGEASGHDAWFYNETNLEYSYKAVSAVLSFVEASSYSWAYTLSVLNEASDTPSAFATADTLTTNGTQWIVDYTNGVFDLIAESSVTKLPVMLQDCFLGEEHWSSYFASTANLVIDTHIYYFAASGIYSEYVNSAVCGQASVAPGDGKFPVFIGEWSLQVLYNNTYEARESIFNTQRYAWSRYVQGGSFWGAIFNGTDSVDGEGTQRDYWSYDRLIDAGVVKSPTNVTYC

SEQ ID NO: 2629 - protein, 780 aa, Aureobasidium pullulans
MIHPIFLLVILLPAVAQCSRLDKRQTPVENEALGTPNLVYNGSFTDGTPGWTVEPPGFIREGMLCVVVPAGTAPKASYIETTQNFTQVKNDIHYLNFTASASHATNLWIQTNGYDPSAGGAPVDPNLNTTQVPLTTSLQPFSFPFSPANQENNSTLTFFLGGSNFTNEICLGDISLHRINRLPYHQDVGPAIKVNQHGYLPNGPKIATVMSQSNSSLSWNLLNSHGILVMSGQTHPFGNDTGSGRIVHTIDFTNHIKQGSGYTLEVAGEVSYPFAITSTLYTSLRQDSMEFFYQQRSGIAIDAELVGYQYARPAGHINVFPNQGDVVTPCQYEWESNVTYLEPWTCNYTLDVSQGWYDAGDQGKYVVNGGISTAQILMAYERSLHTPNDSSNSLGDGSLRIPERSNGYPDFLDEARWEIEFMLKMQVPQNSPPQLFNGTYIDMSGMAHHKMHDNQWTQLPTPPHADSKRRELHRPSTAATLNMVATAAMSARLWAEFDSDFAQRCLDAARIGYAAAKANPAIYAPGTDWDLGGGAYSDDDVRDEFYWAAAELYITTSEAEFENDVTSNYYHTANVSTLFPQGGFGWSSMQTLAQLDLAAVPNNVTGKDAIIQSVMAGAEQYMAVQTTQPTGVFITSYPWGSNSNQLNCIQVVATAYDISRNTTYRTSALLGMDYIFGRNALSQSYIHDYGTKTSSNMHSRLFANELSRLIPQNPIVPPPPKGAMAGGANESPDDPPANDVLKNCVGQFCYVDDVNSYSTNEVAINWGSALAWVASWAADQ

SEQ ID NO: 2630 - protein, 583 aa, Aureobasidium pullulans
MSHLARAAVAAAAAVNASSLADVCTASNIQAALPANGTLLGIDLIPSAVTASAVYNASTSMGGMGSSGGATYSYCNVTITYTHTGKNDEVVVKYAFPQPSDFKKRFYVAGGGGFSLSSTATGGLEYGAVGAATSAGYDAFDYSYDEVVLAGNGSINWDATYMFSYQALGEMTKVGKYITEGFYGMNNTKVYTYYEGCSDGGREGMSQVQRFGDEYDGAITGAPAFRFAQQQVHHVYPATVEHTMDYYPPPCALAKIVNATIAACDPLDGRTDGVISRTDLCKLHFNLSSIIGESYYCAAETSSSLGFGFSKRQAGSQTSTTPAQNGTVTAQDVAVAQAVYDGLHNSKGERAYLSWQIGSELSDADPTYNSNTSSWGLNIPSTGGEYVTKFVQLLDLDNLSDLDGVTYDTLVDWMTIGMVRYLDSLQTTLPDLTTFRGSGGKLLHYHGESDPSIPAASSVHYWQSVRSIMYGHLSQEDAQKELQDWYQFYLIPGAAHCGTNSLQPGPYPENNMNIMIDWVENGNKPSRLNATVSSGDYEGETQMLCQWPTRPVWHGNSTFDCLNDKASIDSWTYTFPAFKVPVY

SEQ ID NO: 2631 - protein, 927 aa, Aureobasidium pullulans
MKSATLILAALFAGAHAAATPGCGSPLSAQLTRGGADKTNTLSFTTSGGVVRSYLLHIPTSYDVSTPAPIAFSYHGRNGNSKDQETISGMSNEAFNPNYLVVYPQGLNAVWQGDPDASGYDDVEFTLELLANLTSTFCIDSTKIYAAGKSNGGGFSANILACDPQASRVFAAFGGIAGAYYQGNTDYPCDGTRVPITCNPGRYPVPIFTTHGDSDATIPYTGGGRRGRCLPTIPHFMTEWSVRNGLGSSNTSVSLYNNNVIRYDYGNDSFSQLSTHYLVHGLDHTWPSIAAGSSFDATPLLLAFWNKWTLDTIPYNFVNATASTPIVSSTISTRTSSTVTPTSSIPSASLCPSVNGQTVTDSTGNMYKVTCSADNSVGSYTNAQAASSYLDCMNACDAAASAGCQGFTYVGGANGQNSGTCWLKKSMGTYTSSGSNTISAVRVSGGSSGNSASTTSFTVSSTASTSSSVSLSAAPVASALSCPASNNQVYTYAGNGAQFVIECGIDHAGGDMASTSVKNLEGCIAACATTAGCVDVSLSGSACYLKKSLGAAVNNGGVLGARFVGTAATSSTSVSTSNLVSTSSSLASSISVVSSSSVAPSISSTSSTQGSTGTIVTSVSTSSTSSTTVSPSIGTDGYTTTNYPPSCTAINTNIYAVTDGNGKPYLFMCGGGSAGGTASTIGNVANWTACFQACDGYSGCTGFTYNQGAALGNGAGQCLIKTDSPQSFVSTAQLLSTRIAGFIHPITTTTSSSSTSSSATLISSSAVAITSSSVALSSSSFSSLSTTPSMTSFSTSTIPSSSATASSSDASSSSSPSSSSSSTSSSSTSSSTSSSTVAVPSSTPIIAPSCPASNGITYADAGGVQYTILCTYDTSVNTISASSSVGSFGDCAVLCDTTSGCTGLTWNGTFCSLKQSFGQYILGAVKA

SEQ ID NO: 2632 - protein, 479 aa, Aureobasidium pullulans
MQAISIALALLSLTGSALAVPAPVEPVPSPTVTAAPSLDDRDLIGDLTGAVNGVLGDAVGDINSALSKVGAGQLAGNQAWSTISSALAQVTATKTQTNAASAISQLSSIHAAKPSANLFEFVAAIAAEGLTANSVTDLLGFVDGLASGQNSMSNVNIQKPKDTIYPKKGNDPKYSVTESSLRSAIYIPPAFKMGAVQPVILMPGTGATGYFTYIGNYIKLLTGSSYADPIWLNIPGYLLNDAQVNAEYAAYAINYVASITGKQVSIIGWSQGNIDLQWAFKYFTSTVKNTRNHIAISPDYAGTVNANLICPDGLPCDPSVLQQQYKGTSNFIDKMRLNNGDSAYVPTTTVYSGLFDEIVEPQQGTGASAFLNDARKVGVTNNYLQGICPGLAGGSFYTHEGVLYNPIAFGLVKDALVNGGAGKTSRIDVNRLCNQYLADGLNVGDLLITENSIVVAALALVLYTPKVTVEPAIKAYATY

SEQ ID NO: 2633 - protein, 524 aa, Aureobasidium pullulans
MRRFIATVGALLSVALACNNADTHPCPGYYRDNLAEVSDFCATFTQSTVAASTGLPSWATVCDNSPKKLSSACSCQVPATAVAASAPSSGVVASTTPSSSGFVTSVKNVESSPVFAITQTHSSSVTSAAAKVAVSPEVVVSSSVAATPAATPAVTSSAAAVPTISGGASVSLASGGVTCTVTEYAGISSAVASCTNIVLSNIKAPASSTIDLTSLQTGTHVIFAGKTTFEDTNDKKFDPIVITGTDIMVEGADGHVIDGNGQSYWDGKGSNGGDAKPNHFIVAKHVNNGRFENLNIQNWPVHCFYVSYCNAITFSNILLNNTIGNERNSKSGSKAAAHNSDGFDISSSDNIVLTDSHVYNQDDCVAVTSGSKILVDSMYCSGGHGLSIGSIGGKSNNTVSDVTFQNSVIVDSQNGCRIKSNEGETGEVSNIHYKNITMENIEKYGLVIQQDYLNGGPTGEPSNGVTISGVTVTDVKGTMSSSKGIDYYVLCGDGSCSDFSYSGVEITGGSGDKCNYPSSGCPAV

SEQ ID NO: 2634 - protein, 346 aa, Aureobasidium pullulans
MIQNLASLLLVSSLALVDAFSLPEAASSFSSLLASSLNNAIPNTLLIRKDGGSGGCPAIWTSISSDLTSSFLGSDGQCTDLARAAIRFAFHDAGPYSSKTVFYAPAAGGADGSLLLNSDEINRPENGGLADYRTWLMGKYTQYNQKAKVGAADLIQFAGSHAVITCPGGPKIKTVVGRTDTSIIAPDGFLPAGFGPNSSHDILFQLFADKGFSARDLAALIGAHSTSKAFTQQANGIPAGGQQDSTPGKWDIDYYAQVNSPPTGTYRFQSDINLSQANTTVGKQFQGFVGNQGKWTSSFADAMFRLSVLGIPSSSQSGFVDCTNALPRGTSSKRDIRAAPINDRAR

SEQ ID NO: 2635 - protein, 379 aa, Aureobasidium pullulans
MRLSLVAPLFAFVALNLNAHVQAWPAMAQQAAALSRRAPQDLIVDNDIVRIGLGDVKNGGTTPVGTSVYNILMGTEAGDSDAAGYKPPGIVGTKACKADTCCVWWWIAQAMTVAFTGPTGRCNGFARAAIRLGFHDAGSWSSSLAAAGQDFGGADGSIVLSGTEINRADNNGLQAIANQALIWSKLFNVGVADIIQFGAKHAVVTCPLGPRTRVFVGRKDSKKAAPEGLMPSVSMSADQIISLFEDKTIQPHDLAALLGAHSTSQQFNVDKTKAGFGQDSTPGVWDVSFYNETLQPGTNSKVFKFQSDLVTANDSRVSDEWHAFIGDQSHWNGDYASAYVRLSMLGVNNINNLTECTQVMPAAKKTFAGASTPGLFGRS

SEQ ID NO: 2636 - protein, 258 aa, Aureobasidium pullulans
MKSTTYSLTALAGLLALTHATPLPAVVVAPTDLALRQCGSQWYNPSSYACRAGADSNALCPVVNGEPMEECAGACYTPYRYNCNGTDLSEKPRKASGTFTLTASNPDQDFSGQPIQASDNHFWVGGHAATYCPSNVGSICSSFPNDMTLIGNGYMATVVPGGQSIYWQKDGALAFTQAHSSSQWNLSYYGGGIAYEGGGYFGPNGEDLVTCPVIPPGSNTTAWQLFARLAGVSFSSSCVGVYALVHDQNITAGAWQYT

SEQ ID NO: 2637 - protein, 471 aa, Aureobasidium pullulans
MHHTFALLLVAILATVALAAPTAKQATAQTLSKRSFTIPRIRKTGYVRKPSEAMGRAYRKFGWSRTTPDGSPWIAVSKTPTTTSYDADTSSSDTTSDVSDESYTAPKTHASAKVKTFLAATLSWGVSAPATSSAAPAAEEEDDETGEVIATPADNGAEYLSPVTVGGQQLNLNFDTGSSDLWVFSTSLTSAQIGEHSAYNSSKSSTYQELDGYTFSLSYGDGSGAAGIVGTDTVDIGGATVTRQAIELATSVSSAFVSDADSDGLVGLAFSTLNSVSPRPQKTFFDNIMSELAQPVFTAALDLDGSGTYEFGTIDASKFTGNLMFTPVNASSGFWQFDSNSYSVGGKTVTRSNATPAIADTGTSLLLLDPEVVQAYYAQVPSAVYDSTTGGYVYDCSEDLPEFAVAVGDNYMANIPGSGITFAPVSSKTCFGGIQSNSGSDLQIFGDVLLKHHFVVFHGESELLGMAAKAE

SEQ ID NO: 2638 - protein, 1017 aa, Aureobasidium pullulans
MLGKTLIKAAALVASLAITSDALALKKQNLNDLIKPYKRELLQDLVTWDEHSLFVRGERIMLYSGEFHPFRLPVPSLWLDVFQKIKALGYNGVSFYVDWALVEGKQGDFSAEGIFAWEPFFEAATKAGIYLIARPGPYINAEVSGGGFPGWLARNPGIPRTRDPRFLNATDNYSRQIGEIIAKAQITEGGPVILYQPENEYSQAVSSDPEFPDQVYMAAVEKRFRDAGIVVPSILNDAYPHGYFVPGSGEGAVDIYGHDGYPLGFDCANPTTWPDNALPTYYGDLHAEQSPSTPYSILEFQGGSFDPWGGLGFEQCSELLNSEFQRVFYKNDFSFGMTIFNIYMTYGGTNWGNQGHPGGYTSYDYGAVITEERLVSREKYSEAKLEANFLQASPAYLTAIPQNNTHANGSYSNNPEIAVTALFGNRTNFFVIRHAAYNSLASTEFKLTLPTSQGNITIPQLNGSLVLNGRDSKWAVTDYDAAGTNLLYSSAEIFTQKAYGDKQVLVVYSGANENHELAFTLSCSSEVIEGSGINIVKKKGTTIIGFKSSSERRIVKIGELYVYILDRNDAYNYWVLDLPSSPVSGNYTDGTIDTSAAIVKAGYLLRTVEASGTILSLTGDLNATTEIEIIGGAPAKLTELKFNGETIKFAQDSCSGVVTASATYSEPSFSVPDLSTVDWKVTNSLPEIVAGYDDSLWTNADLTYSNNTQRNLTTPVSLYAQDYGYNIGNLLYRGHFTATGGENSIYLQTQGGSAFGMSAWLNGTFLGSARGIDAASNANSTFSLPNVASGSSYVLTVLIDHMGLQENGQGGSSEMKTPRGILNYSLNGRNASAISWKLTGNLGGEDYQDRTRGPLNEGGLYAERQGYHLPGAPTSSWSNSTHGPMIGITAPGVAFYSTTFDLDMPAGYDIPIAISFSNATSSTNGAASVAYRSQIYVNGYQFGKYVSNIGPQDVFPVPQGIFDYNGPNYLAVSLWALDEGGAKISNLSLVAGPVIQSGYGPIELSPLTGWSKREGAY

SEQ ID NO: 2639 - protein, 352 aa, Aureobasidium pullulans
MLRSVLLTATALLSSVTHGALTYKGADISSLIMLENQGKTFKTTAGATEPLETILKQSGANSVRQRVWVNPSDGNYNLDYNVKLSKRVANAGMSVYLDFHYSDTWADPSHQTTPAAWDDSTIGNLKYTVYNYTLAVCNRYAAEGINPAIVSIGNEIRAGLLWPLGGTSSYYNIADLLHSASSAIKDSKLSTKPKIMIHLDNGWDSGTQLWWYKTILGQGPLKTTDFDMMGVSYYPFYNDQAFLGSLQYSLEQLAATYSKQLVVAETNWPAKCSKPAYKFPSDATYIPFSAAGQEEWIEAVGKIVAGVKGGAGLYYWEPAFLGNGALGSSCEDNLLVDSTGKARVGLSAFKNI

SEQ ID NO: 2640 - protein, 903 aa, Aureobasidium pullulans
MRYSLTTAALAFAICSIAAPVAHGGNDYGSLSGTGASGVEVSPSGSAGVGADVNGSGAGSAGLAGSADLGSSASPSVGASANLGGSGVGASAGLGGSGGLGAHAGLGGKGSGLLGGMAGLGLGHEGGLSSGLSGKGGAYGNASPSIGANIGGSGSASPSIGAGIGGIASPSIGASIGADSSASPSIGVGLGGYAAPSDSASLGGALGGLGSGQAGAGLGGAAGLLGGLGLGGSGHGHGGIGLGGSGSGSGDLLSGLGIGGSAGIGSGGSAGANGSGDVSGNAGGDTETDASGNGSSADSGASSYGNDSSSSPSESSPSGTETDAASATPTDASSAPSYGDDSSSPEESSPSGTETDAASATPTDASSAPSDDSSSAPSANSSSAPSYGSDSSSSSYGSDSSSPSESSPSETETDAASATPTDASSAPTYGEDSSVEDADGSAAAPVYGSTPSESAVDAATPTEAPTPPETSAPALPLSTAASGSTYKSYIKKRQDLSSLMGGSSGGLSGLSGLSGGSGLMSGGSGLGSFPSLGSGSSGLSGLSGLSGLSGGGLSGLGSGSSGLSGLGSLGGSGTGSASALSTGTASSSSGSGFDLSSLGGGSSGLSGLSSLGSGSLKEKRQFGGLGSFGGSSGLSGLSGLSGGSSGLSGLSGGSSALSGLSGGSSGSGFDLSSLMGGLGSSSTGSSDSSASTGTATTDSSSGSSGFGSLGSLGSFTGSAGGAVPSNDVTGNTGCKKVTFIFARGTTEMGTLGSVVGPGLAQDLIKDTGSCSVQGVDYPADAAGNANMGASGGPKMAALANQALKQCPDTKIILGGYSQGAMVVHNALNSVDGSKIAAVTAFGDPMNGQTFKGVDDSKVVRYCGSSDFVCDMSGKTQGTGSHISYGSNLAEAASRLAQIVGVKA

SEQ ID NO: 2641 - protein, 315 aa, Aureobasidium pullulans
MKSFGIIAGSALFGAIANAAPLAKRDVVWVTEIATDIVTVPVTMTVWADAVETTAVSTTTTQQHGHKFFHSKASKASTTSTSVYVAPTTSSSSVYVAPTPSTTSVYVAPTPSTTSVYVAPTTSTSEAYVAPTTSTSEVYVAPTTSSTSIYVAPTTSSVYVAPTTTSIYVAPTIESTSVYVAPTTSTTSSAPAATTSSSSGSVSAGMAASGTEYSGDITWYDVGLGACGETSVDGDKIVAISHVIFDAYSTGNPNTNPLCGKYVTINGKDGSSHQAKVVDRCLGCVEGDLDLSHEFFNSVTSNGDGRVPGMTWSWN

SEQ ID NO: 2642 - protein, 408 aa, Aureobasidium pullulans
MRLSNLIAYALAPLLASATILQNGQVRDIVFPDTSIASVTSNSNWTSFSPNASQISYKGRWDEKHISWWSAPGLKFGFTGDKVAISFGQYTSQAVLIAYRFAGQDWLFTNVTANSTHQLIDASTVGFNLTTQSQKPQTFELRVTNYAYGVQIAGVHLSKGAKLIKIPNYSKKIEIIGDSLSAGQYGTYEGISSYAWGLAEGLGNVEFDITAYPGICLVDQNCWGNAHGQTYQWYRASDTSYRSEVIYGDNPPLWDFRHHQQSDIVVINLGTNDNNTHNNVTNEKYLSSYIDFVGQVHQKYPRAQIILIALWNGFGQVGNTWEQGGAFIEEIQQVYAHYQHAGFVHYFNTTGILQHNDIGPQYHPTDVGHIKLASHLMQYIKLKFGWVFGATGPEVQADTLYWNDEPGY

SEQ ID NO: 2643 - protein, 704 aa, Aureobasidium pullulans
MQYPIITSLLVAPLLALAQFPPPVEYSNILKSPINENITIAYKTPPAGTCTTAFSTQKQFTGYIGLPPFTLQPIQQNYSINTFFWFTEARQNPETAPLTIWINGGPGSSSMIGMFAENGPCEVVLMADGTYGTQARMWGWDRSSNVLFIDQPAQVGLSYDTLTNASLDLVKGTYQPPSPAPEGYPPYAWLNGTFSSNNPNFTSNTTDISARAAWHFLQSFLSAFPQYNPGAHPNSTNVSTTGINLFAESYGGIYGPTFANYFEEQNSKRENGTIPKNSTLEIKLTSLGIVNGMIDVLIQDYYYATMAYNNTFGIQAISQTDELNTIEAYNSKCASAILQCRQVAGQIDPEGEGDEQQANSACQAATYACNSLMMPFQGSGLNVYDIRVKNPSPDPPQAFLEYLNTESVQKAIGARVNYTSSNRAVQAAFINTGDSVRGGQVEDIANLLRAGVRVSLMYGDADYICNWMGGEAASFAVAAALSDFPSNGLSSSYLSGWNQAGYADIVVNSSYVGGAVRQFGNFSFSRIYDAGHMVPYYQPETAFTVFTRIIDGTDLSTGEAINLSNFTSSGPMNATHVNAATFKQPAPTCWIRDVADTCSIDQLKHMLLEDGMVAAGVYYSNSKQYNAPSSTVTAGKPGTPVARSSTSLSSSGSGSSSSRSTVALTGVFTATATPSPTQGAATERVTIAKWIQNLLALVAVMVVM

SEQ ID NO: 2644 - protein, 325 aa, Aureobasidium pullulans
MKLFTILSGVVSLAATVLAYSNPLSCSGTCTNAHDPSLIKRTSDGTYFRFSTGGGIAIHTASSIQGPWVYKGQVLPNGANVANSGKTDLWAPDVSLVGSTYYLYYTASSFGTQNSVIGLATSSTMDVGSWSDKGSTGISSDSSKSYNAIDANLIKVGSQYLMNFGSFWHDIYQVEMKSTPNTVSASAGPSYNTIFQPSGTHAVEGAYMINYNGGYYMFFSEGICCGLDKNRPAAGQEYKIKVCRSNSATGGFVDQSGKSCTDGGGTVVLPSHGNIYAPGGQGVYNDPSLGWVLYYHYVDTTIGYADGQKRLGVNKIKWVNGWPTV

SEQ ID NO: 2645 - protein, 477 aa, Aureobasidium pullulans
MKYPLILTAAASAVSANGHWPPHHSPSYSNQSLSFDATIKVNAGQRYQTMLGGGCSGAFGAACTTNTLSAADQDAVVRTLFDENIGALSILRNLIGSSAGTTILPTCPATPAGPFNYTFPTASNDSCQLTLAQNAIKYNPDLYIYADAWSAPGCFKTTGREAGGGVICGVRGSNCTYDWREAYANYLIEYVRLYQQRGIKVSLLGAYNEPDFNPITYSAMLSDGYQAYDFLSIFYPMVKKAFPSLAVSCCDATGARQQRDLLYELGRLGGKTLFDVNTYHNYQSDIKEPFDDLLAGQPTLETEWSDGGNTWTRTWDAVGNNFEGFQWANYMHHAFVNNVAGWSHWWCSWTSPTDAALVQVNGTSYQVSARLWAFAGYFRFARPGAVRLFADSSVQEVRVTAWQNKNGTIAIPVINSAHYTYTLDVELGATNVSRATAYLTDNEHNVTMAGQFAFEGGRFTAQIEPRSMKTFFLEEAE

SEQ ID NO: 2646 - protein, 227 aa, Aureobasidium pullulans
MFSDISLKGALLSVFLAAGAVASPIEKRAACSQYTIISTRGTGELQGPSAGFRTMNQQTLAQVSGGTVYNTVYLADASQNSALGTQDIVNKVQSSLRTNPNMCFILQGYSQGAAATVNAMPKLTGANMDAVKGVFLIGDPEHRSGLACNVDANGGTTTKNVNGLSAVLGGIPAAWVPKTMDVCAYGDGVCDTTHGFGINAQHLSYPYSSTVQSMGTKYMVAQLNGSS

SEQ ID NO: 2647 - protein, 889 aa, Aureobasidium pullulans
MPTLSSYILASAGASLVNAQFGNFGSPFPNTTYPGFESENPYTIEGSKSFQWSPPKYPSPWGEGSGDWKESYVKARALVSQLTLEEKVNLTSGIGTNQGNCVGQTGSVPRHGINALCLQDSPVGVRLTDGNSVFPAGVNVAATWDRGLAYARGRAMGQEHYGKGVDMQLGPVAGPLGRAPAGGRNWEGFSPDPYLTGLMFAESIKGIQSAGVMTSAKHFIAYEQEHFRQSQEAKNWGFNVTESVSANLDDVTLHELYLWPFADGIRAGATSIMCSYNQVNGSQACQNSYILNHVLKNELGFQGFVVSDWYGTHSGVSAILAGLDMSMPGDPVQEFGNHGGALFSSNMTIAVINGTVPQWRLDDAAVRILAAYYYVGRDKNEVPVSFNSYSLDTYGYSHNAVGQGYGLINQHVDVRENHSKLIREIGSASTVLLKNVNNALPLTGKEKFTAVLGEDAFENVNGPNGFTDRAGDSGTLGMAWGSGSANFPYLITPDTAIQNEVIGKNGGQYQSLSNNSNLDQAFSLAKQAEVAIIFNNADSGEGYLQVEHNFGDRNNLTFWQGGDELVANVSAACNNTILVIHSVGPVLLEEYANNPNITAILWAGVPGEQSGNSIADILYGRVNPGAKLPFTMGAKRSDYGTDVLYTPNNKIPQTDFKEGIFIDYRAFDKQEIEPVYEFGFGLSYTNFTYSDIKVNKLNTSAYTPTTGMTPAAQTYGNISMNPADHLFPGNFSRVPLYLYPWLNSTNLSSAAGQSQYAPYGDDSFVPEGAVDSSPQPRLPASGPSGGNPALWDVIYRVTTQIKNVGKVAGVEVPQLYVSLGGPYDAVKMLRGFERLSIQPNQTVTFSADIMRRDIMNWSPEAQDWFVSNYTKTVYVGSSSRNLPLTAQLA

SEQ ID NO: 2648 - protein, 749 aa, Aureobasidium pullulans
MVSRSSLTAMARPAPRTVSTNSGRSGNVAWQQDDNMEQSISILETIAKKYGAQEYADVVFGIQLVNEPISWDQNNIDTTKEWAKKAYTAVKSASTNQDLAVIMHDGFMGPSDWEEVGAAVNGGASLSDAKFWIDTHLYQNQVADDSKLTQDEHVEKACNWSSTELLPSSSNLPVIVGEFSAATNICANPDGSTVAGSVCWIDGCQCSANVDIEDWNEPLIQATRKFLEAELDTFEAHARGYFMWNFKGPGAWGYQNAIKYGLIGDKITDRNLETHLSIIHNVCRYYHNPPTTGESKSARKKREKAEAAAAAQAASQPQQDSDGQKTPEITETNGDSFESSHMKELQKNLRNVNKKLNSMTKLDSILAENPDKSLDELLASRKINADQKAQASKKPALQAQAAQLEEQIAQYKKVDADYQSRMSAQHSHLTSTHQSEIEKLKASVKEEHEAALKAVLREKLLTFSQFLRAAAAKRVIEEEADTDESKAFEGALLLVYGGDDKAVDAALSLIEGSDEQVPSVEGELLPIKYSQVKQAAVGFGAFPGEETAQEEAPVESTDATNVQPEDTIPSSDPTIAHAGLTELGINQSAEEEKPIVIADAEPQSIAEASTGDESANKSAETQWDNAAATAGADQELDDSYEMVPRPADETEAVHEPAQPQSTSSWADQTSANATATEAAAENNNATNGLASTDAEGFQSVEKRGGRGGQQGRGGRGRGRGGQGRGGQQRGSFRGRGQARGRGQAPQPQA

SEQ ID NO: 2649 - protein, 693 aa, Aureobasidium pullulans
MAPASCVFFGLFCDSTSGTTTSVSTTSSSIISSTTSTILSSSTSKVVVASSTSSAAPVSTLKTSNAGVYSNCYYNIDGVGEFNTRWVADWTTGATQDLTGIVSSAYTVGTPSTSSTTTSSKIKRGLGSLFSLFSNSLSFRIVPSSTKAVTSTVSSAVGSTVGTVGSVVSGVTTGATAAVASVEASLSSSTQLYTQYNDILYGSVRAVILLSNATGFTSFRSDTMEIDLNWLNYHSTYDTTAVSDASTAWHEYRVDWLPGATNYYIDSKLMSSTTSETSPGLWLWNAWSDGDDDSVFQMRSIDAYFNRTSVATDLANGVAVCKEVNIATAAASSVVDTATSLVGTVAGAATGVVGGVVGGLVGGSSSTSSSSITPTPTPAPTTLSTSTKAPSLSAQATVSFTTISSAWTGKTTSTTTQVNGLSATVIVLTPGVVAATTSSSSTSSSGGYVYMTTTTDSGTFTAVQTKTLLPNIGTTATVQIIYPTPVTTCSNTGIAYAGYTNSFAGGQATYGYPKFTPTVYKSAKPSQTGITNYIAEVNSGSTGANVAYYGRTTTTQNWVIDHVFYLFARQDGYYSFNIPYTDDLQMVWYGDKAVSGWTRDNADIVQFWSSQIAVQTPQTIAVYLTTGSYLPLRVMFANGGGAGELDFNIYGPDGSTILASNRGLGTGSSSIDIVQFPCDTTQGKKFPAWGAET

SEQ ID NO: 2650 - protein, 470 aa, Aureobasidium pullulans
MKHISTLALAASTIIGAEAITLQKRSDSASRVIEHEIQRKHVANPLKRDRLRRRQNTISQELDNEQTLYFANVSMGTPEQNFRLHIDTGSSDLWVNVATSTQCEDTQQNDCSISGTYAPNSSSTYEYVNSLFNISYVDGSGSSGDYATDTFHIGGADLPAQQFGIGYVSSSEEGILGIGYPSNEAILTYQRESYVNVPQHMMQSGLINTNAYSLWLNDLDASKGSILFGGVNTEKYTGSLQTLPILAEQGVYAEFIIALTGVGYNGQENSIASNVNTAALLDSGSSLMYLPNDITEEIYRLTGAKYNSEYGAAFVDCNMRYNDTTIDFTFSSPTIRVSMSELVLVMGYQGRTPLCIIGIAPADGTTPVLGDTFLRSAYVVYDITNNEISLAQTNFNSTGSNIMEITNTSIPDATGVPAAVTSVASETGGGRLGGFPSGSVTSSALGVAMTPGPKSFGALAAVGAAAFFAL

SEQ ID NO: 2651 - protein, 805 aa, Aureobasidium pullulans
MAGLRLLTLLASVALLLCFFPSCSVHAQSDTEGPLHTTNHVKRYGSGAPYWMSQIPRQGKVVYGTNSSYPVWRNVKDYGAKGDGVTDDTDAINNATFAGGRCQYPCESQTTAPAIVYFPPGTYAISRPLVMLYYTQFIGDANSLPVILGLPNFYGIALLDSDPYLPYGLSWYANQNNMWRQVRNFVLDIRQIPKGTAHCLHWQVAQGTSLQNIVFEMTEGGDNNKQMGIFMDNGSALYLEDLIFNGGGVGFFSGNQQFTCRNLTFNNCQTAIYQNWNWLFAYKDIVINNAKIGIDMTQGGDVITTGSISLQDATMNNVEIGVLTTFSGNSTPASAGTLLLDNVNFVNTPVAVQLSPSNATILEGNQKIASWAQGRVYTAYESSYEENNLTCYGPAAKFDRVQQLVEPPPKSPSLLTPDGSFYTRSRPQYEGVPVENFISIKTYGCAGDGVTDDTACVQSFLNSIRTDQIAYIDYGAYVIRDTINFPIPIKVQGELWPYFMVDGSAPKFSDQNNPQVAFRVGQPGQVGDIELVEIMFQTLGAAPGAILMEWNLAQSSPGSAAMFDVHWRVGGTNGTKLQSYNCRKTPNVPTSPKAECYGAFLLLHLTRSSSMYMANNWGWVSDHEMDLADHDQINLYNGRGVLVESQGPVWMLGTSFEHSMLYNYQIASAKEIYISAIQSETAYMQNNPNAISPYPPLSNWNDPTFSDCFTVNCPKTWGLRIFNSTYIFAYGAGMYSFFNNYDSGCLATTNCQQKMVSVEQSQGIYLYAVNTVGSSNLVTVDQVDLVPAISNANGFADTVAIFEYP

SEQ ID NO: 2652 - protein, 545 aa, Aureobasidium pullulans
MKVSVLSTLLFAAGAIAGRSPQHVNKKLPERMRREPAGDFPAVGLDKRAASKKKKHIIPQNSNTTKYAVDGTKIPDVNFDIGESYAGLMPISSQQNASELYFWFFPSADTHASDEIVIWLNGGPGCSSLEGLLQENGPFLWQYGTYAPVKNNYNWNNLTNVVWVEQPAGTGFSSKGSTPAATNEEEVAEQFAGFWANFMNTFGLHNKKVYITGESYAGFYVPYIADNFIQKNNSRLYDVHGIMIYDPSISYDVVLQDIPATPFVDYWGPLFNLNQTFMDDIHNRSDACGYTAFMEEALTFPPKGLLPSPPNADYSMPGCELWNDIYNAVSLVNPCFDIYQVATTCPLLYDVLGFPGSFDYLPEGVQIYFNRTDVQKAINAPIQEWEECTGGILRRDTSEYTSLSVLPKVIEHTNNVIIGQGMLDYIISYNGTLMAINNMTWNGAQGFSKGPSAYEEFFVPYHSELNLGDLAGSGVQGAWHTERGLTFATVQLSGHMIPQYAPSAAYRMVEKLLGRTKTLGDKSNFSTQKGNFGNSFNFITANVTN

SEQ ID NO: 2653 - protein, 336 aa, Aureobasidium pullulans
MSPRSVTLLSALLAASSVSAAPAALQKRVDIVTAVIDGKTVTWENNWFGAPAPTAAPTAIPSSVAAAASSSAANNGGAEWITASFNGAVFSWQVNAPTAAPAASSAAPAPAQPTSATAPQPSQAGNTDPSCKDVHIFLSKGWNEPYPGRQGKLAGAICYGLDSCDYEDILYYNAEGSDYCTAVSEGDKNGIDQMTAYANKCPASKLVLTGYSQGANIAGDILGGADICAGPNPGLDPSTSPGNKIGAALIFGDNRHVADQSYNVLNGSSVSSNDPRSPDSLARMNKFAGVLRSYCDQADPVCAAAGPGPFTVDNHLNYFDRYTDDAAGWVKYMLGY

SEQ ID NO: 2654 - protein, 716 aa, Aureobasidium pullulans
MHSFTNMPLIPFLFSLFSFVNLSIAGYVLKDDYNSASFFNMFDFFTEADPTHGFVQYIDQGSAWNTGLISNSNGKVYIGVDHTNVQPNGRPSIRLTSKAAYNSGSLVILDLDHMPGNSCGSWPAYWMVGPSWPNGGEIDIIEGVNTQNHNAMTLHTADGCSIYDNGNFTGSLYSDDCYVNAADQTNNLGCQISTSQYNTYGDGFNNVGGGVYAMEWTDEAISIWFFQRGTIPSNIQSGNPTPDASWGRPLSQFTGCCDIPEFFSDNQIVFDVTFCGDWAGSVWNSDSTCSALSGSCTDYVANNPQAFSNAYWSINSLQVFEQTAKSSGKVALPAFCNNNTPTSTETSISSASTISTETVPAETTSTVSSTVSTTATVETSSTQTSSSETTSSTAEPSSTSESSSSTESSSTDKTSTTAASSSSSSMAESSSKTENSSMSQSSSSDSTSSTADTSFTAQSSSSDKTSSSAAKTSSAAQTSSQAASTAQASSTPQQSSVKMSSVDTSPTPASTAETAATTSSTQSLPQMTNVVTTLVLAVAADATSTQWTTVVTTIRRAVSVTMAAADSSATVQPTPVENSQTTPAANVETTPTAQPTVAETTVLTTYVQAVSADATTTLWVTITTSLERAITNAPALADTTTTEWSTLEYTVAPDVYTTQWTTITSTVNYQKARRTALPESLMLGGSESAASQTTRIEAQPSPSRRWLPRYWGRARI

SEQ ID NO: 2655 - protein, 265 aa, Aureobasidium pullulans
MYSTLAILSGLLTFITFTTTVTAHGFVQGIVTNGKWYPGAQPWWRVNPQIPHAKSAGWSSLNQDLGFISPSEYGTADIACHKSAKSTNTRIPVKAGDKVKLLWSEWPQSHKGPVISYLAKCPGDCSIVNPTTLDWFKIDQAGLINGNPAPGTWASDTLIANNNSWTVTIPSSLIAGSYVLRHEIIALHSADQANGAQNYPNCINFQISGKGTAKPAGVKATKLYSATSKSIAISIYWPVLKSYTIPGPALWKGAVKRWVERIFEA

SEQ ID NO: 2656 - protein, 327 aa, Aureobasidium pullulans
MVWESSVTLVAAALALSNLVNGLPNSHPSKSHYPGWAGIKHIFAFGDSYTTTGFNVSLAQPSPANPFGNPTYPGYTSSNGPNWIDYLTTTYNKSFIETINLAYGGATVDSALVAPYKPTVLSVKEQVQTEYLPIYASQSSIFPWTSDDTLFTIFIGINDIGNSYSSQNATLTPTIFSELSGLVDQLYSTGARNFLFLNVPPVDQSPLTQAAGPASQALEASAISDWNSRVVSLSKSLTHRHSDVTSFVFDTNKVFSRVIEHPCAYPQTCAYQNTTQYCEAYQNGTPEPTSFNATCGVSVDKYLWLNSLHPTFRMHEAIASQIVKLIK

SEQ ID NO: 2657 - protein, 377 aa, Aureobasidium pullulans
MRPQSALLAIGFAAIVSGQTPGSDGQITVATATCTAIGTQTYAVTDAQGILYRYQCGAGTFGAQFSAVPSSSVGNWTACFAFCDNAPGCSGFTYVNGAPNGNGPGGCNLKSGTAQSLNSDGLVSTRIGAIMARHGPKPAPTNSCPAQNLQTVTDFNGVNYVIACGNDTNGVGVTALQANYGFNECFDKCDSYTASTSPSVCNAFQWVGTGANGVGGGNCYLKFVSTASFVTAYNTNNVGGIRVVAATPTIASSASSSSSSSSSSVSSSRSSSSASSAASSSSSSVSSSSSSSLSSSSSSSASSVLAVPASSAAPSTPTPTPTLLGCPQGDGSTFTDSSGTQYLLRCDKTFTGYTDQQYEEPDLSTCLTLLLQNVLMQ

SEQ ID NO: 2658 - protein, 234 aa, Aureobasidium pullulans
MLFSISTFAAVSAFASAALGAALPVSANPNTVAKRALTGEATFYGGNTSGGQCSFTEYTLPSGVYGTALSDSNWSNAANCGACVSVKGPNGKSITAMITDQCPGCGTNHLDLYENAFTQLAAKSAGIINVSWDYVACPITSPLSIHMKSGVSQYWFSAQVVNAKRRTTKLEVSTDSGKTWKAAARTTYNFFEISSGSGATSAWIRVTSETGSTVTVKNVSQTGDVRATATANYA

SEQ ID NO: 2659 - protein, 581 aa, Aureobasidium pullulans
MAPSIASLSAIALAGLPLALGQFVKAPTNWTHATGYSDIQVRYKEVPTGTCELNSSVKSYSGYLDVDTDEHYFFWFFEARNQSPKDAPLTVWINGGPGSSSMIGLFQELGPCRIDENGTVVNNPYSWSESSNMIFIDQPTQVGFSYSVPVPGYTDANSGSIVTLPNATCPEYAQGCGTYSYPNETLTANSTAGVAPNFWKGLQGFMGAFPQYSRHEFNFATESYGGHYGPLINQYIEKQNDLIAKKKLPKAHHINLKTLLIGNGWYDPLIQYQAYYNFTVYPGNTYDYKPFNDSISAMMYNALYGPGNCVDMTKDCYASGINEVCSFADNFCANNVEEVLDIYALRDEYDIRELSPDPFPSTFYVDYLNSPTVQEAIGAYVNFSESNSAVSSAFGSTGDDDRESGTIEALKYLVSDDITVVLYAGDADYNCNWLGGEVVAGEVNAPGFSSAGYTNVTSSDNIVHAQVKQSGKFSFVRIFESGHEVPFYQPLMSLEMFDRAINGKDIATGRRTVKGGYKTTGPAKSTYREGNSTVQFEVVNATATYNTTSNEPDPISAKKSFKAANKRRLFKPAKRIVDLTS

SEQ ID NO: 2660 - protein, 627 aa, Aureobasidium pullulans
MVKECILGQLLGLASVAVTQQVYLEANGSTPRPCTKCIEGEPQYTFTPFQYSMTSTVRYATSRPSPTTTTTYAPPSESLTSLIGTVSYTTWGKWNPTANATATDTADPYGNAAWTELWRMANPPNFTQEAASALYSTTVEPTPVPTEELVLPPRDYFGPTDCYNFPPGFEFGVASSASQIEGATAEEGKGPSLMDILVQDDRPKDYVTNEHYYTYKQDIERVAAMGVKYFSFSIAWTRILPFALPGTPVNQQAIQHYDDVINYIIEKGMAPEVTLLHFDTPLQFYGSIENVTALLAETEIGYVNGGYQNETFPDAFVNYAKLVMTHYADRVPVWYTFNEPLLYSANGKSIDHVIKSHARVSHFYQEELKGTGKIALKFNNNFGVPRDPKSEADVYAADHFNSFQLGPFCNPIFLGQDYPESYKMTITDYVPLSQQDLEYINGTADFLGIDPYTATVIAPPEPGSIDSIKACASNSSSGLRPYCVNQTTTDIFGWNIGYRSQSYVYITPTYLRLYLNYLHNTFRTPVVLTEFGFPVFAEADKENLSDQLFDSPRSVYYLSFMSEVLKAIWEDGVQVLGAFAWSFADNWEFGDYDQHFGIQTVNRTTQERNYKKSFFDLVDFMKARGVE

SEQ ID NO: 2661 - protein, 605 aa, Aureobasidium pullulans
MRAVAAFAACVAFANAQTFDMDMILAAEPVPTPSIPVVYITGDAPSTTASATTVSYVETQAAASVSLEVAAAASSTALIKRAASTCVPQPTGISHNSSPDTASAFLADAYYSSVASAAPTPAGYVNTFTNLQASNNAYGYMGYQLLSTYDTQLCSQKCDKTNGCLSFNLYFERDPSVDPNDSSCSNPASVTQIKCVMWGGPTLKSNALNAGQWRNKFQVVIAGSNGYVNKTIDPAPGYDQPIDLGDATINAPLDCSGHDTFMQSKFFTSGPFDANLCAAACSAQNVYNLAHPPAEGKPKTCQFFTTYLLYKDGVAQGQTCSLYTMAWNSTYNTNKGYYYGQSHYTVGYSFAFSNTTNSGAPYAACSSSSSSTVVSSTAKASSTAVSASSTTLSTATATPTALLPDTSCNNAGLQFAYYPGLASTQWDFNSPNYGLDAENYKTVTPNYTGVTNFIGGFAWNTYHQSSSIYSSTRPFDHEKMILNHRGYFFAPTSGDYTFSVPTCDDAAFFWLGDMAYSGFNEFNYLLLDNQANGTQSATVTLTAGKYYPIRLIYGNVGGGPGSLYFQITQGNKVAADWSSTVSPYFVQKSCDGTTAPAYAAFGQET

SEQ ID NO: 2662 - protein, 368 aa, Aureobasidium pullulans
MYALITKIGALAVASLATQAVAVPSNSKPDPFSNASWPLPHNISGVSNPGANESYQGWGGVHLHDPSIVMGPDGHFYSFSTHGLVVISRASQPNSLDGYWEPIGSVLEGSSIINNTGNTDPWAPDVHKVGDTYYCYYAVSQFGSQFSSIGLATSKTLRPGSWVDHGAVLTSNTTAPSPLNITNAIDANLFIDPKTKIPYLTYGSFWSDIWQFQLAKDLLSVVWTPAPVQLSLDPVSPQAEEGAYLSRHDSWYYLWYSHGSCCGYNVSALPAPGQEYSIRVGRSRSATGPFVDRNGVDLRNGGGYIIYGSHDYVYGPGGQAVLTNYHGRDVLYYHYVNTIQNPTYVDELKLLGWNYINYIQGWPVLSYD

SEQ ID NO: 2663 - protein, 678 aa, Aureobasidium pullulans
MAALWALQALLLSCLFLTNPVQALLNATEDAKALVIANDRLYASVNKSTGIMDILTLDGQNLLGTKEYNEVTPGGNAAGQNGIGPYLDCYCVPAGAYTPGKYATFKLFEGNDSTGVPYGGVVMSEVYPLTGQVLEQYWFLRETETGLHTFSRLAYYNETKPFLRNLQEFRTLFRPTTPLWTHISTNEKINAPLPSSDTLKNSKTVQDATWYIGNYTSAPYVEQFADYFTKYTFSDEWRDHKVHGMYGDGSKSKDGSTFGAWLVMNTVDTYFGGPTHSDLTVDGIVYNYISSNHHGDNVPNITTGFDRTFGPQYFHFNKGSNTTTLGELRAEAEQFASPTWNTAFYDSIAHFVPNYIPSTKRSTWKGRIDLPKGAKRPIAVLAQNGVDFQDNVLDTKAYQYWGDIDKKGNIEIPMVKPGTYRLTIYADGIFGQYIQDNVVVAVGRVTTTKAKWREESAGKELWRIGTPDRSSGEYRHGDQPDPSKPLHPPEYRIYWGNWDFPTDYPEGVTFEVGKSDEATDFNYVHWSVFGGYANSVRPEPYYENVNNWTVLFDAKKSELKSKKDATLTIQLAGAKTAAGNTDNWNATQLWNNVPLSVVMNGHELEPWDIPWNQSSSCATRSAVICYALAHKYEFDANLLKEGQNKMILSLPFNATDYESAVLPRSTYVQYDSLRLEVK

SEQ ID NO: 2664 - protein, 393 aa, Aureobasidium pullulans
MSVRATRLFASVVSLLAASSAATNITNSSSPWIDWRTFKANGVNLGGWLEQEQSMDQAWWFKHSNASDEWNFCKGLCTQCGPILEERYATFITKAHIDKFASVGVNLLRIPTTYAAWIDVPWSELYSGNQQKWLREIVEYAIDEYGMHVIIGLHSLPGGVNALDIGEAVGHASWFNNQTNLALSLDAVRSVLDFIISSPTPHSFTIAPINEAIDNPSGLGQSTALTNNGSAWVTHYIQQVIPLVESTNPHIPIMLQDSWKGVSFWSPFFPSSKNLVIDTHIYYNWKQTYASNVTSLVCAQAATTFGDGKFPVFVGEWAIESTFGNELQRRKGIFEVMRYAWRNFNISGSAFWSGRYEGNATVDGEGLHRDYWGYARLIDAGVVEEVDESAVFC

SEQ ID NO: 2665 - protein, 435 aa, Aureobasidium pullulans
MSFKIAAAAALATLASTVSAHGHLQSIGASGTTYAGFNNSILYSNTKPDLIAWSDTVKDNGYVADYTSPDMICHAGAGNAKLSAPVNGGDSISFNWDTWPTSHKGPVITYLAKCDGDCADADKASLKWFKIDATGIVSGDSNTGTWASDKLISDGFKWDVKIPDTIASGNYVARHEIIALHSANNVGGAQNYPQCINIEVKSSGSDEPEGVVGTELYTAQDKGIYVNIYYPPFEQYDMPGPALYTGGSGSAPASSAAASSAPASSAAASSTYAAPASSSAEATSYAASSAEPTTYAASSAQPTSYAASSTVEASSSFTTQAAVVSSAATGGDEVVVTAYQTDIVTASTAVTVTAGASATAAVSDIKSAIPASLLSSTISAGIPTATASSGVAKPTKALPEGTTLEDLLSWVEYLFAENASKTSSKARRHARAFRH

SEQ ID NO: 2666 - protein, 929 aa, Aureobasidium pullulans
MGLTRLATFFALAAVSIADTCNPLNARCPPNVGLSTSAYEVDFTKQSSIPSEWTISDWATVKLGSKGAEFTVSMRFESPQLWTNFYIHYGKVEIVAQVAPGTGIVSSAVLMSDDADEIDWEWSGNNFRDSAGKGQNNYYGKGIVGDYDRGSFFSVASPQTQFHTYTIDWTSTALTWSVDGTIVRTLLAANTDSGSHQYPQTPAKFQLGIWAGGDPGNAWGTVDWAGGYTDFTKAPFTMYVKSVKITNYNPAYAYNWTDSSGSSKSIKIVQKPVVSSSSITTTSPPTSSSTSIVISSTQITSTTSISVPSKASTTCAGVPPSAPTQNGIVSGCTQWYTAKSGDTCSKIAAKFSIPIEEFMDWNPAVDAPLCYNMWLNYGYCVSTDCALANTSSTVVSTSSTSTSSSTSVTPSSSSSSTIVVSSTTLPTTTISPTSNTSTPKSSSISATSTTTTPASSQTTSGPSTTSSSTQSSTLPSIPVVSLSATVPSSSAVPSSTPSSTLCPDTDGLSLLSQNKNAYTIRCSSDTNKGSYTNTRAADSYLDCMDACDDAANSGCKAWTYVGGTNGNGGGVCWLKNTSGNFLPAGNNYISGVLSTKGSSSTSTTRTVSSTSSSSSAAPSQTTSTSSTSTTISTDLPLASPSAELCPEVSSQSFVASQGGSVYFMRCSSDTNIGSYSNSRASTSYKDCMDGCDKDSKCQAFTYVGGTNGKGNGQCWYKDTKGSAVPAGANYVAGFLAARAPSSGSSASSIATGNLAVSSKSSTSSSTTSSSSSSTSTASTSWATNSAGSNYTVYRSSDTNWGAYTNVQAKDSFLDCTIACDNDPNCKAYTYVGGKSGSSPGVCWLKSKLGEPVPANDNVISGSRVTQSVKMRRAVSSWWNSVTSKPTATTTKRVATVKPKAPANPPWARYYPHGGRWMWNGHGEYEWAWN

SEQ ID NO: 2667 - protein, 365 aa, Aureobasidium pullulans
MVNFLSTAILGASLVAAAPAMQKRGSCTFTSYDDVADQIADCSTVTLSDITVPAGETLDLSDAADGATITFAGTTTFEYSEWSGPLIRAGGKGVTITGASGHTIDGNGAKWWDGEGTNGGKTKPKFFYAHSLTGNSVIKGLNVKNTPVQAFSVQATDLTISDITIDNTDGDATDCDGEACGHNTDAFDVSESENVTIKGCTVKNQDDCLAINSGTGITFSDNTCSGGHGISIGSVGGRDDNDVANIVISGNTVTNSANGLRIKTVYDATGSVKNVTYTNNKISGISDYGIVVEQDYENGSPTGKPTSGVPITDITFDGVTGSVDSDAEEVYILCASCSDWTWSGVDITGGKSSSDCEGVPSGASC

SEQ ID NO: 2668 - protein, 701 aa, Aureobasidium pullulans
MVSSLLQAIAFMLGLSQLASAQSYNEPYRPQFHFSPKKGWMNDPNGLLYYNGVYHMYYQYNPGGNTWGNISWGHATSRDLTKWEEQPVALLARGYGKNVTEMFFSGSAVADTQNTSGFGKKGKVPFVAMYTSVHPYVEKLPSGKTVRPNQQSQSIAYSLDEGMTWTTYDAVNPVILEPPAAYADQFIDFRDPFVFWHEETKKWVVILSLAQLHKLLIYTSPNLKDWTLASEFGPVNAAGGLWECPSLFPLPLDGKSSNTKWITQIGLNPGGPPGVVGSGTQYVVGSFDGKTFTADADSVYPPPAAPSGSIIFADFEGTSFADLGWTATGDLVGSGPSAGTVNGQQDVTGYVGSSLVNTFLSGDATVGTLTSKSFTISKRYINFLIGGGNALGQEGINLVIGNETVLQATGANGEKLVWQGWDVSAYKGQNAVLEIVDLLTGGWGHINVDQISFSDTIATPQKANWMDYGPDFYAAVPWNGLPTNERTNVGWMNNWQYAQVIPTEPWRSAMSVPRGLALQTVNGKAQIVQTAKEKWSSLESRGGSYSNKWSSVSEGTQKLKLDGKTLDIVLTFDDRSAAAGKASRFGIVLRASKDLSQQTRVGYDFTIKQLFVDRTKSGNSSFDATFASVYYAPLQATRGGKITMRILLDWSSIEVFGGVGESTLTAQIFPADSGTDVLLFSEGGKTKDVSVTAKGVGSAWK

SEQ ID NO: 2669 - protein, 257 aa, Aureobasidium pullulans
MHLSSFLPSLLALSGMAAALAIPDPFLETRQSSPAAGVVYTKCTKPGLFALAFDDGPGPYTQELINTLNAAGAKATFFFTGTLYGCIYDRAAAVKAAYLSGHQVASHTWTHPQTLDSMSVAQLTTEMQKLEIALVNIIGVKPTYMRPPYLKTGGNVPTAMRNLGYRMITDSVDSQDWNGLSVSQSEQRFKSAGPKTPDGFGHISLLHETYANTVRDLVPRLITWAKQNNLKMVTVAECLGDANGAYAKGTGGGAQKC

SEQ ID NO: 2670 - protein, 328 aa, Aureobasidium pullulans
MALSKASLFLAWTAFLPSLYAAPLLQKRSESGPHITTDFPDPSILRVGSTWYAFAGQSLYDYKSTHIQFATSTDFETWTLRPGNDMLPDLPSWVDSSKNHIWAPDINHLDDGRFLLYFSAPTYDTNAPHCIGPAFSDSIDGPYTPDKTSFACPADQGGAIDASGFRDADGTRYVVYKIDANSLGHGGTCNNGVEPIVPTPILIQQVESDGVTKVGDTSELITNDSPEDGPLVEGPSLIHSGDTYYLFYSSNCFATTNYDVAYATSSSPTSGFTKQGTLFGTGYGGLRGPGGADAAFDNSHFAFAAQKGDGRRGLYTAQIALSGDSVSA

SEQ ID NO: 2671 - protein, 696 aa, Aureobasidium pullulans
MWLSGIALAAVAASANALDLTVAANGGNATSPLQYGLMFEDINFSGDGGIYAELIRNRAFQGNTVHPSTLLGYSAVGGTNLSLKNLSQPLSSALPTSMNVAVAKASSGDVGFSNTGYWGIGVEVQDYTGSFWVKGSYDGSFIASLKSDITKETLASVEVPSKASASEWIQHNFTLTPTSAAQNSNNSFTLTFKKSGVTGGSLDFTLISLFPPTYKNRPNGLRKDIAEALKELNPKFLRFPGGNNLEGDDPPYLWYWNETIGPLKDRPGRPGTWGYQNTDGLGLIEYLHWCQDLELEPILAVWDGFYLSGPVTPQSELGVWIQFALDELEFLMGSTSTKYGALRASLGYPEPFQINYVEIGNEDNLGGGNASYSAYRLPMFTEAIKAVYPDITIIGSTPTVDPIPDHISLDYHEYSRPDNFVREFGLFDHYNRSHPILIGEYAVIEPNNASMASVDWTSGATRLAFPSWTGSVAEAVFLIGAERNSDFIIGASYAPTLQNLNSFQWVPDMISFTADTTKDVLSTSWHMLQLLGNHLITETLPTTGGNFGPAYYVAGYNNQTGSHMLKTAIYNATADVPVSVSFKGVSAGATATLSVLTAPSGDSYNNVGTQVVKSTNTTIKASAGGVFRFSLPNLSVSVLEVQGRPTYWAGSWGGHRGAWGHGGFGGWTPSWGGWGSWKGTGHNKRDIPKGYKEIVY

SEQ ID NO: 2672 - protein, 341 aa, Aureobasidium pullulans
MIGSRITPVLLSLLPFTLAAPMRTTGNTHPTQVISVDFADPDLLQDGNQWWAFASNNHKTIAAVGGSLINVQIARSPDFNSWTVTGSDALPTVGAWADPKAGNQGAAVWAPSVSKNKKGQYVLTYSAAVKGSPGKHCVGAAVASQPQGPYNPQAAPLVCPLDQGGAIDSGAFKDADGTQYVVYKIDGNSMGHGGVCGNTNAPMVNTPIMIQRVADDGFTPVGSPVKLLDRSDLDGPLIEAPSLTRTSNGKYVLFFSSNCFATSNYDVTYAFADNIMGPYVKRGPMMVTGTNNLYAPGGQAVAADGKHMMFHAGDVGSANMGWRGAYTQIINIDTGSQVVSS

SEQ ID NO: 2673 - protein, 532 aa, Aureobasidium pullulans
MKITIFSAGLIGLAAALPQASIQESSSSVVQTSTTSVSSPEDVPHATSLAQAAAVNVTISVEVPSEIIDTTSLESNSPALLTTKPVESNEFLSPADFLTQGLSLDDIPEVPVDTSALSKRDFFGLFGSSNARGPFVNFLKVAAQIFVKVEKIIIYWTCPQWTRPTPNTFPGWRNYKSNGVNLGGWLVLEKNIQPSFFNDNAPSAIDEDSFCKTLGQVKCGALLENRYNTYITTKDIDNFAAYGVNTLRIPIGYWAYMPAIAGDNYYTGGQKLAMQKIAQYAISKHNMHIVVDLHGLPGGQNGLDNQGKTGQLTWWNNQTAFDLSIEMVRRATDDILRQPNSGSYTISLINEPLPALYYFGQTQDSIAYLNKYYKAALAEVRKRSKTLPVAISDGFIGPQTWDPYWTNVDPYIVIDTHIYFFVGGSYSYDAAYGACYLAKSYQNASNPTFIGEWSIQATNFNHLGDNTRRDFYRSQLQAYTQYLSGGMFWNGKHDGDAIVGDDGSAQKYYWSWEILASEGIVPRPGDKLESLC

SEQ ID NO: 2674 - protein, 365 aa, Aureobasidium pullulans
MRQTISLLALSVAASTTASAKSTTHNETIYKYTYDLNTTYQGWPNFFSGFDFEDDANPPGSGYAAYVNQSYALSNNMISNGTNGAIRIGVDHTTIISSKSKSGRKAVRLNSKMVYSYGLFIADFTHMPGGICGTWPAFWMSGPTWPIGGELDILEGVNTNPRNKITGYTNATGSCTNSQVIISSNLTSTDCTDLEDTGCSMSSSSTASYGTGFNTDSGGVYATEWTQQTGIRVWFFPRSSIPSDIVSGKPEPSTWGIPAAAIPAESCDMSTHFFNMQLVLNTNFCGGWANRTWKTSGCNRYADTCEEFVRSNPEAFEDAYWEVNYIKSYTGRNVISVVAVNGTTSSATMSVRPPMLLRWLTRMML

SEQ ID NO: 2675 - protein, 415 aa, Aureobasidium pullulans
MHFARNSALAGLVVIPLAAAQTYTTCNPMEKTCPNDVGLDSASFACDFTKGKSALASWSAASGTTLTYDGTKGAQFVINGKNQAPTISSDFYIFFGKVEVTMQAAPGTGIVSSMVLQSEDLDEIDWEWLGGDTTQAQTNYFGKGNTTSYDRGTYQSVSSPQTVMHTYAFDWTKDQVQWLIDGVVVRTLKYADAVGGKNFPQTPMRLKLGNWIAGDPDTNAKGTIEWAGGETDFSKVPFTMYVQSVSVTNYNPAKEYNWSDKTGSYESIKLIDGTSSGSSSSSSSSSSSKSGSSGSASKSATASVKSTAVISNSANTVAPTSSISVRKAQAQGSAAVVNSSNSSSTSTASTLSSVISSVSASATSAAASKSSSHSSSSSSATSSQPAEQTANAGVSNTVATGLVSIIGAAMAYFIL

SEQ ID NO: 2676 - protein, 805 aa, Aureobasidium pullulans
MAALLSLTALALLGGSASAQTFQGTAQGGFPDCVNGPLSNNTVCDKSADPIARARALVSAFTVAEKLNLTGNNSPGVPRLGLPIYQWWNEALHGVAESPGVTFNATGEFRYATSFPQPITMGAAFDDELITAVAEIVSTEARAFNNHGRAGLDFWTPNINPYRDPRWGRGQETPGEDSFHLSSYVHALILGLQGGEDPEIRKVTATCKHFAGYDIESWNGNLRYQNDVQISQRDLVEYYLPSFRSCARDSNVGAFMCTYSALNGVPTCADPWLLNDVLREHWGWTNEEQWVTSDCDSIQNIYLPHNFSDTRQGAAAAALNAGTDLDCGTYYQHHLPQAYSEGLINQTTVDQSLLRLYTSLVRTGYFDGPDAMYRNLTFSDVSTPHAQQVALTAAEEGIVLLKNDGLLPLTVTNSTKIAVIGDWANATQQMIGNYFGVPPYLHSPLYAAQQSGAQVFYAGGPGGQGDPTTDHWLPMWTAAEKADIIIYAGGLDISVEAEGMDRETINWTGAQLDAIGELASYGKPTIVAQMGDQLDNTPLLQNSNISALLWGGYPGQDGGVALFNIITGKTAPAGRLPVTQYPAHYVADIPMTDMTLRPNETTGSPGRTYKWYNGTAVFEFGYGMHYTNFTADVSPMAASSYDISALTSNCNETYKDKCAFESVSVNVHNTGSVSSDYVTLGFLAGQFGPSPYPKKSLVSYQRLHSIAGGASATATLNLTLGSLARVDDVGNTVLYPGDYALMIDTMPEKTMVNFTLTGSPVTLDLWPQPPSGGPTIPPSDYFYGGYGSRGEFPIAATTEVLEPEE

SEQ ID NO: 2677 - protein, 274 aa, Aureobasidium pullulans
MPALKGQLVLLTGASMGIGAAIARSLAASGANLALFSRSEDKLQALAEEIKSAHEGVKVTYRAVDVGDHEAVDKAVLSVVKEMGEIDVLINNAGLALGAPKAFPDLKITDIITMNNTNINGYMFVTYSVLNHSMRTPSRHTGTILNITSTTALEAPPFPGEAVYHANKACQEGFTNALRNELCGTDIRVLALRPGVVGTHFHRQRVGFDDGMYDDFMDGYKPLVPEDVAESAVYMLNAPMSVSIKALDVVPSAQRSLTVFDREWSKRNEKKDAN

SEQ ID NO: 2678 - protein, 364 aa, Aureobasidium pullulans
MKYSFVSALALAASVNAHSIMQRIMVDGVDQGSLTGIRAPPTNNPVQDVTSNDLVCGASASTSSKVITIPAGASVAGAWAHGLGGPQGAGDSDNPIAASHKGPTQVYLAKVDDATTASATGLKWFKIASDAVTSAGVWGVDDMIKNTDSAGFGWQKFTMPSCVAPGQYLMRVELLALHSASSEGQAQFYQSCAQIKVTGSGSYSPASSAQIAFPGGYSATDAGILANIYDTSIYTSYKAPGPAVISCGAGSAPASSAVASSVAASSKPASSAAPVVSSTKVATSAAPAPTTSAIKTSVAPVTTTKAPTTLSTIVKTAEPVTSAASSSGSVAKYGQCGGKGFTGATACVSGSTCKVQNDWYSQCI

SEQ ID NO: 2679 - protein, 276 aa, Aureobasidium pullulans
MTKLFGLSVVLAIFAASSSATSLNETELLESRAAATKKSCMITLPGVGRFNQYVKYDFAKWSKFPLGLSISNYGITADPEDEEHPFDQFYGPKNVVLKRGRPLQLRVPGGQTKSPIQGAEFTTAYDDILFASVRTVAKVSNVAGTCHGFFFYKSDTQETDIEIRTSFPTTIFLTNQKSSPKALTSTFDTKSPLDMTSDFHEYRFDWLKGVTKFYVDGKFVGSLKKNVPTMSGSMVWNNWANGGSWSGGPPERDSVLEIRSIEMYYNRTSVTGVNCK

SEQ ID NO: 2680 - protein, 573 aa, Aureobasidium pullulans
MVSALLASFFFGFNAFVAASCLASNTTYTNPILPGFHPDPSCIFVKEWDNTFFCASSSFEAFPGIPIHASKDLQNWKLIGNVFNRPEQLPDLAFTNRSTSGIWAPAIRYHDDTFWLVTTLVFDNKTQHDSSRWDNIIFKTQNPYNQSSWSIPVHFPFEGYDTSPFWDDDGKTYMTGSHAYRVSFGIWQKTIDLETGKLGPEPWIDLWNGTGGTAPEGPHIYKKDGWYYLMIAEGGTGLTHEETMARSRNINGPYTPYSNNPVLTNANTTQYFQTVGHADLFQDADENWWGVALSTRSGPNYITYPMGRETVLTPVSWPEDDYPHFDPVRGTQSGPLPPVNKNISGQGQFVDDDDHITFAPGTSLPLHFVHWRFPEPSAYVISAPGHLNTLQLSPSLLNLTGHDGIYTSGEPQTLLARRQTDTLFTFSVDLEFTPTTMNEEAGVTVFLTQDHHMELGLVSLSNNGTSTPTLRFRAKSNIPVPQDVLFPVPANWTSDLHMEIKAFNLTHYAFSAGPAGKMSLMQTIAYAPASLVSYGFTGTLVGVYNTLNGGGQGNGTKAYVSNWNYQGQGQFLV

SEQ ID NO: 2681 - protein, 535 aa, Aureobasidium pullulans
MVKSSYVALSAALAVAAIATDVSVPNHLPTRQLLQDAYAYSLEPVWTQDYISSNLTRNLMNVIADITGKPPTFRVGGNTGDQTYYHPELNVSAVALPNTTVTNTFNISNAWFEQWGSYFPQGTDFLYTLNLKDNSSAWANAVQEAAAAYSVLGDKLKLFELGNEIDHFINKGWRPSTWDVAMYIQQWRNISDQIVHSSWYEAADQPPKFQAAVFADPPWVPDQQDEIDDFDIINLTRAGLTEHDKIGSYAVHLYPQSTCDTTRWYRLSLDLLSNHSVLWHNVSQYVPQVAAADKAGIPLVFGETNSASCSGRSGISDTFGAALWNVDYVLLAASIGMPKVYFHLGANAEYSSFVPLPYQHKNESLSAGIRSLFYGHYFTAHVLASNTQQRIAPIPSANTSDFSGYAIYSSGHHHRHSENLNKLVFIDLQVWNGTQGLSNPSTLSTTDSTFHSAGQRPVREVSISTSWKQGTCLAITRLQAPGTNAKSEISVSGVSFESQTGKQVGEIQKEQVVVGKNGQVCFVMQAAEAVLIERK

SEQ ID NO: 2682 - protein, 433 aa, Aureobasidium pullulans
MLRTLWASTLVTGSALALNDRVGKLPALGYDTFNAFGCGYNASDVAAQAEIMKKTGLIDAGYNFIILDDCYALKERNATGYMVADPEKFPLGMPAFSSQMNKLGMKLAAYGDSGYETCAGYPGSYGHELQDLHTWHSWGMSYLKYDNCYIPADNVIQQNVFGKYKRMSNAIAEFAKETHVTFQYSLCEWGWEQPWIWGRRIAQSWRNDGDIKPYWSSLASIINQASFQYWASDFYGHNDMDILEVGNTGLGTPPGNLTYEEAKSHFTAWALLKSPLIIGTDLTRATNQTLNILGNRDLIKINQDPNVGQSISPFRWGVNPDFVSNATNPAEYWSGNSSYGVVFMILNNQDTPQEMFFNLTESWVIRAGRQYSVYDMWSHNYTGIAVRNITLQLPAHGVSALLLNDAGPEPTYLNNTCAMYYQCSYPNGTYISN

SEQ ID NO: 2683 - protein, 463 aa, Aureobasidium pullulans
MLSSARDMLPSLAVWGLLLPSTLAAILPQYDPFYTAPAGYESKAPGTILRSRRVATAYLGLIPDAVQAWQLLYRTTAINGTAISSATTVFKPLNPKTDSFVSFHTAYDGSAATGACDPSYNYQLFAPQIDLISSVEFFLLQAYLLEGYIVQSPDYEGPDAAFGAGRLAGMGVLDSMRAIANFKTTLGLTTSTPKIVGYGYSGGAIATGWAASLLSSYAPELNVLGWAQGGTPANLTGTAVFIDGTLFAGFLPQALVGLGADSAYGAQLDPVINRIATAKGKNTLKVAEQICGVENLFTFAFGQIQSTDFQTLGNKVFFEPTIASILEKTVMGVNPDETPKAPVYLFHATNDEIIPYANASTLYSDWCADGASVHFTTVANGGHATTEIIGFVGAFNFVKAAFAGTVAKGCSTETILDDSLDLLALGVSLEPVLVQLLNALAVAGRKDINIKNDITTLNETVGA

SEQ ID NO: 2684 - protein, 666 aa, Aureobasidium pullulans
MTYNNAHFLSLVAATSLLAVNCLAQAPPTPQGLTYVNSTVFPGASISFKETTICETNEGVRGWSGYVNLPPVPWEGQNYEVHTWFWFFEARNDPANAPLSLWLQGGPGAPTSVSAVNENGPCVLLNNSRESANNPWSWNYRVNMLYIDQPVQTGFSYDTLIQGVVNEVLSPFAVFPGADQTTNETALAGVFSSQNPRLAPNSSDAVAPAMWRFMQTWLQDFPGYRGDKDKFSIWGESYGGHWVPTFADYFYSQNARIEAGELNGTSLAIDSIGLINACIDAETQMPMYPVMAANNTYGIKIFNDTAYAASMAALPQCLSYTRQCRELAASLDSSKSSGSDTEVNSACGKAYGYCFNYVARETGLGGLQDYDAFHFDIASPLIHSFPPRWAAGYLNNATVQEDLGVPLNFTGFSATIAGEFEAAGDFLKGDNLAILGQLLDRGVKVALMYGDRDYQCNWFGGEAISLAINSSTSADFEKAGYTNFATNASYNGGLTRQYGNLSFTRVFQAGHEVSYYQPETSYEIFNRVIFDRDIPTGQTSTAASDSSSPYATTGNSSALVSIGAPIKFESDVVSCYLWDIMETCTLTQTALFKNGSAITEDFVLVGYERADGSRVFFNESTVGGNGTNNGNGSSPVPYRPSNGASHGPARDLWLVALAVAAVTALL

SEQ ID NO: 2685 - protein, 555 aa, Aureobasidium pullulans
MIVLILFLFGAGLANAQAIPTASQCPSANGQTITDSNGSTYRVTCSADNNVGSYANTKAANSYLDCMTACDAAASAGCQGFTYVGGANGVSSGTCWLKKSIGTYPAAPSSYVSAVRIGNVGASSQSSVASTLATVITSASSASSALSASSTLSTAVAASTSLCPSSNFTSFVDTARNNWQILCGFDTSPGSFGSTSASTFPACIEACRTTANCAAVTYIGTSCYFKTAFVSLITKSSASSAFIINLQNYPVPVTGNSRASSGCGAPLLPGVQLGGTSTTFQITSKGQVRSFNVHVPTSYKNNMAVPLIVAYHGRSNTQLSVESDSRLSSETWNPFAIAVYPLGGDQQWQGDPATVGTNPYYDDLAFTSDLLDYISNYYCIDTSRMLATGFSNGGGFVGTLACDPTLSQRFSTFSVNSGAEYTNTTGSCNPTSVLTNTIVQPICSPGRSNLPMIEFHGDTDGTIPYPGGARRGYCLPTVPHWVTDWAIRDGLSTSNITTSLASGKVTKYEFGASQGVQGLVTHYKVAGWGHSWASINAGAPIDATPLIMDFFYSHS

SEQ ID NO: 2686 - protein, 1920 aa, Aureobasidium pullulans
MSFYFLLRVFALCVLALLVAADSPNHSEIHGRSTIKTANKLSCIKSDVSLVKKEVSHPLEFCKFYLSDKRTRSPLPSLGVTALQNACKCIQASPPPEPTIIHGALPSNKQCSQWTKLLNGEYKHVAEFCNFYLGYPRKRSPVPGLSVSNLLTGCKCAIGSTTVASVAKAQQTSTARTLASTKYSSIAKQATSSASSRIAKASTGTVASTPQATLSSKAATVLGFASRISPLPSATKSSTSVVLSSTTSETDSATRGAPNVSAYIATPASSSQVTPLQTSGLSASTVFRSSESNTPTTRKTYTSITATRGMPTTSSALSAILSATQDKTVFTAAETSFHSDVLEVGTLASSTDSASSSVGMTFQSSSTAYKSITVIRGQPLSTKIKSTVSSTSIAPTQSSIDTSSSSQTQQKTSMRWASMRGKLPITTLTTQTRDLASIVAFISSPDASASGGTASTFAPSDSVGSVSVSRSIVPPTTSSAATESSRASTWTTQVNNSSVASENSASIVQGRTSSARNVPSTSTTSPASGLSGSPSRGTESTSTTMQYKEITSGKQPDTSALLATISKSDTSVLPTSNILTTASPLTSNSRMQKLSELSTTAARSLETSSTYTELEYPTYSSDGGYPEWTPTKTSETTADQQSSLTFMSSDKAPGVWISSDTPSSTPDLSQTSKLASISYKNPIYHETSATLATTDLSESIVALLPTDKPSISFDTVSSDSIMPSSSRDPSNDYEPSRTAVLSSDGAQSSEQTIATRITPHSTVDTISGISVTEIKAMSANSTQGELVLSAKTASASTTITTQQSSAVTGIGSEALHSTSEEWRSSTISSVSAASMSSESSGLLSSATWKLTTSFLLTAVSSETAFETSSSKFATIESSSTTESLPDPLPSSGINSLDHDFTPISDSQHASTTEPPTESTVNSSATLTNSAQTSIDPETTPFTSLAQHNHGYLNVTSQNYDNSTRNSQTSSGPGGEAITPSSSMSERILDSSLSSSDSSTVAETVVSVQTTNVADDFVSSRSQELLVSMFSMASSHSTSAQVTTAIDSLWLNATSSTGSSSVETNSFSSAVPSSIFPASEMVFSTESSSSGSPSSTIIGQNFLGASSGDSSTEGSTLTYYKPASVSASPTISYDAIALTTTSSSTTSDVSAGTSVDGSSYTDLTNPETPASPNTDIGPSQTESSSIANAPDPTMTGFEDTDDSVTPLPDSSSDISSIDDRQTPIAASSSAEEPSSSSVSLPGVAETSSSDSSSSETSPIFTGTTEPYPSATSGAIDIDEHFVDVVAEGTTSSSSTVEPSGTSLTGETTIQTIAESTLQSPSSVYHSSEAKSTIAEMDTGSMPSAATSSATFPDDANFTTPSSSEARVETAMIPSSKRTSTFHAPSNTTYTSLEMDIDSVPAATSSSATISSSSIPEPLLTASSPSPSDDLGWTETSTTPNPYSSDVVAQDLSSSSTSFSETLSVASSSTLQSSISGPMNIASASALESSSSEYARSIAITQTDSTDSTTESTTMPMAESSASVSSFLIPSSSTQFPSAMSSSDSTEEPSSSASFTSLGFCQTGAASTLSSYPSASQFCSSFMAPPVVTATTTIYKTSQRVVTQYYSNSTLTTTTCIPASNSGNNFRKRDVPATLAAQTTYLWKRDDAGDAGTASVTCSVAPSVLSGYSCDDTPTSTATVTSGIQQAGAIVQTTTESITVTVISSSTSYIPQTSTVLYCPRPSSDCNNKGYLFAYYGNEPYGNDVANMDATYTKQMTPTYNSTTNQGVGIYGSEWSSVSLYGSSQMYSDNYFYLSHKGYFFAQVTGYYNFTIKDADDIAYVWMGDAAYSGWTGGPSGGNYVAKARCCWPPENTNTTTYWMEAETYVPFRIVLGQQDGSTSLGLTITAPDGTVILQTGKESDYVVQYSCDGSAPPFPDWGYET

SEQ ID NO: 2687 - protein, 595 aa, Aureobasidium pullulans
MPQSTLVIFSALAGLSAAASVQSLAEVCTVENVQAALPANNTLLGIEPIASSVTANAVVNATTSGSGMMRRSTRAGTLTYCNVTVTYTHTGKDDKVVVQYAFPQPSDFQKRFYVAGGFAYELPSSTTGGLTYGAIGGITDAGYDAFTTSYDAVNLKGNGSINWDATYMFAYQGIGEMTSLGKAMANPFYGNNNDTKVYTYFEGCSDGGRQGMSQVQRWGEEYDGAVIGAPAMRYAQQQVGHLTSVAVEHTMDHYPPPCSMAKIVNATIAACDPLDGRTDGVISRTDLCKLHFDLDTLVGESYYCAATTSSSLGFGFGKRDAVAGSSTSTTPAQNGTITAADVAVVKGIYNGLHNLKGERAYISWQHGSEVSTDADPTWNNNTSSWELNIPSTGGEFVTRFVELIEEDNLSTLDGVTYDTIVDWMQTAFVRYMDSLQTTLPDLTPFQKSGGKLLHYHGESDPSVPPASSVHYWQSVRSIMYPESSYSHEQSLQALQDWYQFYLVPGAAHCASNSLQPDGPFPEDNMATMIDWVENGIKPTGLNATVSEGQYSGEVQKLCQWPTRPVWKNDAWKCVNDQASVDSWTYTFPAFKLPVY

SEQ ID NO: 2688 - protein, 235 aa, Aureobasidium pullulans
MVAGIKLWLAALLPVALACNGYTGGVPKAVGTKTNKAVITVKAGQTFDGKWNRYDRGAGACNGQGEGGKADAVFLLEAGATLKNVIIGKNQAEGVHCDGHCTLEYVWFEDVCEDAISIKNDKSGSQSWIIGGGAYHASDKVVQHNGCGTVNIINYYVEDFGKLYRSCGNCKSQCKRNVYIEGVTAKNGDLLVGINSNYGDTATIKNTCSDAGTKCQMFKGCAGGCEPPKAGLCTG

SEQ ID NO: 2689 - protein, 808 aa, Aureobasidium pullulans
MRFTTELLAVALALADVTSAQNSTYNATAAAQAKLTAELANLEKFWSYGRSPPVYPTPQGAGRDEWATAYEKAKTLVASMTDYEKNNITYGYTSKTNGCGGNSGSVPRVGFPGLCLSDAGNGLRGTDGVTGFASGVHVGATWNRNLAYQRAHYMGAEFKAKGVNVLLGPVVGPLGRVAEGGRNWEGFSNDPYLAGSLTFETVRGMQNNVVSCIKHLIGNEQELDRNPAGVNASMSANIDDKTMHEMYMWPFQDAVHAGVGSAMCSYQRANNSYGCQNSKVMNGLFKGELGFEGFIVSDWGAQHSGVASADAGLDMAMPSSAYWMNGNLSQAVTNGSLASTRLDDMATRIVASWYHLAEWQNPGHGMPVNLTLPHEYVNARDPASKPSTFQTAVEGHVLVKNVNNALPLKAPGFISLFGYDGIAPSSYTPDNSPAFTLSNFGFSPVSGVNSSELLMLFVNPSSIPSENLPGIAINGTMVTGGGSGAAQPAYISDPFNAITEQAMQDDTWLQWDFHSQNPVVQRGSEACLVFINAFATESYDRPYLEDEYSDDIVLNVAAQCNNTMVILHNAGIRTIDAWYSNPNVTAIVYAHLPGQDSGKALVEVLYGKQSPSGRMPYTVAKKPADYGNLLHHLTPDNTSNYYTQDNFTEGVYIDYKAFIAQNITPRFEFGYGLTYTTFNYSSLQSKVLSNVSTAEYPPSSPIAQGGVASLWDVIATVDCTITNTGSVTASEVAQLYINIPGGPAKVLRGFNKQGVQPGKSVNFHFDLTRRDLSEWDVVSQQWRLQSGNYPIYVGKSVLDIQLTGSLSI

SEQ ID NO: 2690 - protein, 279 aa, Aureobasidium pullulans
MSSFFAKALTLGALAAPMIVSAAPSSMVKKSQIITTSAKQAAVDLCGTADNLVLYDTPWIVYNMFYGAASSVGTQCTRYDHVVTPSTGNKEIVWSAETNIQYVKATDNVPKGYAFVGLTQNLETTISGISSIPTTYTWTRTNTTAFKGNVCYDFMTSNTKGDSTTSNAQELMLWLQYEGGQLPIGWAAGAKATINNLFGTSWKLYEGKNDDTGITVHTMMPEKQFKGSFSGDLKLWLEALVQHGTFKDSTYVNVGNAGTEYFYGNSNLNATLGLQINLN

SEQ ID NO: 2691 - protein, 330 aa, Aureobasidium pullulans
MLSYILALCLNLCLVLAASRTTAPSGALVVSKAPAKGQYSKIQDAVNALSTSSTTAQSIFIEAGTYSEQVYIAPRKAALTIYGYSENTADYAHNVVTITQKLSQNEVATNDLTATLRAWSTNFKLYNVNVVNSYGSGKQALALNAAAANQGYYACKFIGFQDTILAQTGTQLYAKSYIEGATDFIFGQHGLAWFTGCDIRVLSASLGYITASGRASSEAGYYVLDHCSIAAKSGATVAKGAYYLGRPWGAYARVAVQSSTISEVINAAGWHIWNTGDERTDHVTFGEISNTGVGASGARKFETKLSKAVAIADVLGSGYASAAYVDKTYL

SEQ ID NO: 2692 - protein, 534 aa, Aureobasidium pullulans
MRVSTYLAALATAACASAKVWGNSTTAGSVTFDNNRRLLFDTDGNQIDAVGAKINEFGGRYYLYGNSVSQKDAFYGIKSYSSNDLLNWQYEGYLFDIDDGKNPCTGSGGCGRPHIIYNQNASTYILWANAGSVGYQVATSDSPTGPFVFESSPAMIDPQFDGLQPADHAVEIIDGKGYLVFSALNFRDPRAGSLFPQVYQTLHISELTDDFLNTTGVSYPVASNATAELDFVDQQAESPDIFKRGDYFYIGGSNTCGYCNGTLALLYRSESIQGPWTRQILAGYGCNSQFEGVTPLTDPNTGETTYLWSGTSVSGGDPRVGFSGHIYQPLVFNADGSVQDLDCSVDAEFTVAFPRDNSTTATGNATEAGDASPALAVYSAVCDSDFFTLYQTWPASQDGTVESVSLNMARGHQEAALSLTLFKFSSHEDLLTPGYKWTQLGTASFFANQTTWVFDTVTVPVSTNGTVSKGEFLGVSIAGFDVSPWCHLEYDGADEDYILYAQGGGQYSLRGAQGKTSPVYQRVGKSVKFFATYA

SEQ ID NO: 2693 - protein, 462 aa, Aureobasidium pullulans
MRPSTLLLAASGSAVLAAPTPSLLGDILSLTNNVITTVTSTITNNLAQQVAQLGCTLQTNANKHGQIISSVALTVQAIEVAAKRFTQTCNWSKPGKSYINWSTYKANGVNLGAWLEIEENYDTEWWAANVGSFPDEWTWCSTVGFSVCGPLLEKRYASFFTTADIDKMGAKGINTLRIPTTYAAWTKVPGSMLYSGNQQAYLRTLTNYAIDKYNMHVIVGLHSLPGGVNTLSIGEAFGHDAWFQNATNLDYSFKAIDSILTFIKTSDRQNSFTIAPINEASDNFAGFATPAGLTNDGVNWINTYINGVFSRIAKVDKRIPLMLQDSFFSEQFWSPFYAAGTNLVIDSHIYFFAAAGAYSQYVPAAVCGQAKYIGQGDGKFPVFIGEWSLQTLYNNTIDNRKTLYDTQVYAYQKYASGGAFWNGKMLNTRDTVDGEGKLQDYWSWEGLSDAGVVSTTFNQSYC

SEQ ID NO: 2694 - protein, 979 aa, Aureobasidium pullulans
MSGFKSLALLLAAQLANAQGGYPNPPVDGLPFPGTNYPGSEVPYAVAGAKFNQTSPPYYPSPWGTGAGEWAGAYEKARAFVSQLTLAEKVNLTTGVGWESELCVGNTGSIPRLGFKALCLQDSPLGVRFGDFVSAFSAGVTVAATWDRKLAYERGHDMGSEHRDKGVDVMLGPVVGPLGRSPEGGRNWEGFSPDPVLSGVLNAETVKGIQDAGVIACTKHYILNEQEHFRQGGPNISDAVSANVDDITLHELYVWPFADAVRAGTGSVMCSYNQANNSYVCQNSHLLNKVLKAELGFQGFVVSDWAGQHSGVSSALAGLDMTMPGDVSFDSKTSFWGANLTIAVLNGTVPQYRIDDMAVRIVAAWYLVDREDTQLEDGPNFSSWTSRTEGYRHYIAQEGFEKINSHVDVQGNHRDNIREVAAKGTVLLKNKGGLPLKGTEQLVGVFGEDAADNQYGPNGCSDRGCDNGTLAMGWGSGTANFPYLVAPHTAIENEVRSHGKSVESILDSYAYSQIDVLAQRTDEVNGACIVFANADAGEGYIIVDGNQGDRNNLTLWQGGEAVIEHVSSLCKNTIVVLHTVGPVLINDWYEHENITAILWAGVPGQESGNAIVDVLYGKVNPSGKLPFTMGKTRESYGTDLLYEYNNGGAPPQTQFEEGVFIDYRAFDRSGETPVYEFGYGLSYTNFSYSDISVSVNTAAPAYKPNSGFTDAAPIYGTVSNNSADYVFPDDVRRIEYYIYPFLNSTSLRASSGDPYYGSNYSFPAGSSSSAPQPLLPASGASGGNPGLYDVLYTVTATVTNTGAVEGEEVPQLYISLGGPNDPAVVLRQFDKFSIAPGASKTFTAEITRRDVSNWSPELDDWYVSEYPKTVYVGSSSRKLPLKAALPANGATSPGTGNGGSGNGTYTVPPVSVSSSAPGTATLPSSSASKSSSSSKSSSHSASHSTSKSSSHSSSYSTTKTHGPTSWTTYTMPTGYHSTS

SEQ ID NO: 2695 - protein, 694 aa, Aureobasidium pullulans
MRYSLAVPAFAALAAALPAPQEIDLDMVIAQPDISYTTTASRVTYDVTSIAAQATSDISSISVDISAIATQTPVAVRRNVGKRAACAAQPTGVTSYAVNTPDDTASAFSANPSFAAAASAAPIPSGYSNTFTNLNASNNAYGYMGYTALSSYDTEKCASKCNAINGCMSFNTYFERDPSLEPGSGCTDPASVTMIKCVFWGGPVSASNANNYGQYRSKFQVVIAGSNGYMNNTLAVPEGFTSAQYLGNAAINAPLDHEGYDTFMGSRIFTAGPFNASLCAAHCQAQNAYNIAHPPNNGSPVKICNFFNTYLLYLNKTSNSQGQYCSLYTEAWDSSYATNKGQYRGNDHYMIEYSYSFTNASSAGFNPKKGDTNGAVHQASVDIQYATLQPFCSSALGYSALLATVTPTTVVTPLATSTVLRTTTTTASINKRALSTPAVLTKYPASIVSSACSMLVSQATSTSTSTAPVTTIQAATQTTLETSVITVTASPIPSICGNKGIQYAYYGGSQYTEGDNVNAVYPEHYANRNPTWAADTTKVGGIDISSSNSQAISLYGSSTQVSSQYFILNHRGYIFAQVPGTYTFIISNPDDIVFLYLGDNAVSGWTRGNANAVASCCSNYPTRASTSYTLEAGDYLPFRIFFGQQGGPVRFAFSITAPDGTVILDNNTSESDFVVQYSCDGTSAPAFAPFGQGQ

SEQ ID NO: 2696 - protein, 648 aa, Aureobasidium pullulans
MYLSLLSLSVLVSYVLASPTGNYVIHEKRDATPMGWSKADRLDRRALIPMKIALTQRNIEQGADYLHEVSHPESAKYGQHWTAQEVADHFAPSDETISSVMDWLIASGISSDSVKLSKGKNWINLEASVDQAESLLNTKYHIYEHGATGQPHIGCDEYSLPKHLKDHIDFVTPSLHFDTRVRERSDKLDKREVTPDTGKSIGQPGSWSTPHLGKYINKSQFIKELEQCDEQITPNCLKALYKIPKSTGKSVKNSYGIVEYTPQAYVPSDLDLFFANFSEKQVGDRPITDLVDGATVQQTQMGFNYNGESNLDLEYAMALIYPEKVTLYQVGDLVEGASFNNFLDAIDASYCTYEGGDDPSQDGVFPDPYKGGYKGKEDCGTFAPTKVISTSYGYNEADLTPFYEKRQCDEYMKLGLMGTSVLYSSGDYGVGGNSGQCIAANGTYNSGKDGRFNPSFPATCPYVTAVGATQVIPGTNIITALASGTQPEEACETVIYSGGGFSNVFDLPSYQSSAVKSWFKNFPPPYGADRFNNTQKTRGFPDVSANGANYVVAIDGTFALVYGTSASSPTFGAILTIINERRLQAGKSSIGFINPTLYAHPEVLNDVTQGGNQGCGTPGFTASKGWDPVTGLGTPDSVKMLNLFMSLP

SEQ ID NO: 2697 - protein, 418 aa, Aureobasidium pullulans
MARKTAYLGLLAASSFALTLAAPVEERTVNVCPAVDLVVVLLKAYPSASPFCSSFLGISTVTTTSTVKATSPITTIIPTTTTTVFVAATPVTEYDVSSTTITTCIPSAAKRDLAKRKEKTTSTTSSSSSKATTTSIPASISIPGTCNGCPGLLKNIACTAVSSACGCLGLSTPTSTVYVSTTYVPVVTSYSGVAATQTTTGTTTIPTTSTSTILSCPTPSICGNQGIQFAYYANEPWGDQISTMDPSYYWTKTPDYSGTTTKVGGINEPAGSDVNLYGTSKNVPASYFVLNHRGYIFAQVDGDYTFTTSQVDDITFLYLGDDAIRGYGLNNFDAKAVCCDAPANSASATYSLKTGQYLPFRLVFGQQGGPVVFSFSITAPDGTVILDAGTQDSKFIVQYSCDGTTAPAFPAWGQEQAL

SEQ ID NO: 2698 - protein, 362 aa, Aureobasidium pullulans
MHLPSITAALALIGLSAATPTEYSTSSSSSKDQGLAQAWTSKGRQYIGTALTIRDDPIEQGIIQARNEFNSITPENAMKWESTEPSRNNFTFAGADAIIDFADKYKKEVRCHTLVWHSQLPAWVSEGNFDNKTLISIMENHIKKLAGRYKNKCTHWDVVNEALEEDGTYRKSVFYNTIGEAFIPIAFRLASKYAGSHTKLYYNDYNLEYNNNKTLGALRILKLIQSYGVQIDGVGLQAHLTSEATASSGGGVTPDTNTLTKVLKGFTDLGVEVAYTELDVRFTVPVTEAKLKVQADAYARVVQSCINIKKCVGITIWGVSDKYSWIPGVFKTEGAALLWDEQFNKKPAYYSVLKTIQAWRKT

SEQ ID NO: 2699 - protein, 218 aa, Aureobasidium pullulans
MPSFKSVLLVTAYAVLALAAPASEIEKRSETITTNQVGTYGGYYFSNYVETGSDSLTLGTGTYSLKWTSANTDVVAGIGWQTGAARTIKYTGSINAGGDSLIALYGWTTGPLVEYYVIETYGTYNPGSAGTHLGTVTSDGGVYDIYETTRTNAPSIQGTATFHQYLSVRQSKRTSGTITFQNHINAWKSLGLNLGTYNYQIMATEGYQSSGSSSITLQ

SEQ ID NO: 2700 - protein, 675 aa, Aureobasidium pullulans
MRFFPIAAFGLSVGASLAACPYADKAAARPDCPYASTGKNKFAQYGNGTNRTSPSADKKGVFYFNRIAPSGSQLWISNADGSNATKLMSNQTAPFDYHASWSSDGQRIIFTSERRADGQSDLYLVNTDGTELTELVSSDSFEDIGSLSPDGNKLAYVSTAINYTTNIFVKDLHTGISINVTGSDESVGSFVGPHSFFRPSWSPDGHWITFSSDAGTQWTGHSDGTGWEHTQSLAVFVVRPDGSGFRKVIGEESRCLGTPRWSPDASRIVYYNISTEDTYGAHGTVAGQELAVFSQIYSVDVATGSDVVQHTFDNTLKVSPAYLGNISNIGYLVKAGTEAGIHYTSPDTTHHYINSTMRNPAWSPDGSKVVYEVYEWGQRPAEKELFSWDEEWDYRFMDVFPSFNIETGRLATTEKQLGNGSSSIVLTGADYANLTTAFDTWDTNASEEYAELYASGLAGAFQPTWTADGSKLAAGFGVWFFDRILYPGTLYSFDADGTATQNLTDGTNNAGFPSFSPDGTKLVYRLWNATYGPLGLHVLDMETGDTTQLTAGWDNTPGWSPDGELIVFTRQTNWTSGSSWQEDRFDICTIRPDGTDLKILTESEANDAHAVWSFDGRIMYSTGMYGFRDESVMYDNTFQPYGQIVVMDKDGQNKKMLTDSMWEDSMPLYVERKFF

SEQ ID NO: 2701 - protein, 240 aa, Aureobasidium pullulans
MLLNTLLLTVAAFGSSANAAAAAYAQCGGQGFTGDKTCVSGYTCVANGVYYSQCLPASNTAKPASTSKTSAAPVSTSKAASGGGSSGTTYKASFTQYGSGDTFGSGNCNTKTTACGFYTSPGYSAALSQNAFGVGPGAGAGPACGTCWKLTAQTDSSGHALSNAGNTIVVQITNLCPADGNPLCSQNGLTGTNQYGANLNFDLCLNSGANTALFGNSGVGLAVGTAVQVSCSQWSGTVVH

SEQ ID NO: 2702 - protein, 531 aa, Aureobasidium pullulans
MRISSAISALTALVSVTSAAATTKAVSASVTFDNNRRFLFDTDGRQIDAYGSKVNNFNGKYYLYGNSFSETGVAYGIKSYSSSDLQSWQYEGLLFDPANKNNPCAGSGGCGRPHIVYNPNKKSYVLWANAGEVGYVVATSTSPTGPFVFSAARALIDPAFDGLQPADFTVEVINGTGYIVFSALNFRSPNAGNVWPPIFQNLHVSKLTDDFMNTTRVSYPVSSAAGDLIDNEAESPDIFKVGNTFYVAASNTCGYCNGSIALLYRSNSIQGPWTRQILEGYSCNGQVEGVLPLTNPANGAVTNVWHSTSVPGGPRTGFGGHIFQPLTFNADGSAKNLDCSTTASFPVTFTKGNGTAPAGNATKAVDTTPALAVYNPVCDSDSFILYQTWTASKAGTIKSVSLNVARGSQTVPLTLTVFKLNSLNDLFTPGFKWTALGTAAFNANQTTYTFDTVTVPVTTNSTVTKGELLGLSISGADYSPWCHLEYSTTQDCGFKLYQQGNGQYSWRGLQGKNPPVYERQGKSVKFFATYA

SEQ ID NO: 2703 - protein, 420 aa, Aureobasidium pullulans
MKYTTTALAVAGMAATVRGHGFLSSPKARMPGTAFQAACGQQVYYNQAGDNYGNVQGELQVAKTQTDYKAAECDIWLCKGFKYEDNKDLVQTYTAGQKVPIKFEVRAPHTGIANVSIVDTATNTIIGTPLISWDVYASTASGVPADQTSFDITIPEDLGSKCSTAGACVIQHWWDSREVDQTYESCIDFTVSGSGSGAAPASSKAASSKPASSAVASSSAAPVVSSSAAPVTTNVAKVTSSSSVVAKAPVTSTKAAASSVKPTTMTTVVKSSSAAPASSGSASGTVAAYGQCGGKSYTGATQCASGYTCKVQNDYYSQCIAGSAKVIDASSAASSTSCTSTITITKSSSAATSTGADSASTGVNLSDAVKAISTGVPSAALTATATGAAPTGTAKPIPEGFTLKDCLDWINYIVSNAGQQ

SEQ ID NO: 2704 - protein, 656 aa, Aureobasidium pullulans
MRSGLDFLVHLLALSPLAAEPATAARRDRPQEALLPPIPIDYTPLPSQQHEFTLRHIYHKGSHQYPDLLRKVDIKPGVTLEHIQGHNDDSEYGATVLATDSYRINSGPMTIQRLADRRRKTIDRLLEAGRMWGEAVSLPPSAWTMDEIDGPNITDKETVLGFARMAANAYVIKPHTGDWIDVGGGFNYTEDFGWESDGLRGHIFADTKNRTVVIGLKGTSPAVFDGADTTGNDKLNDNLFGSCCCGQGGQSLWKQVCDCQTSAYTCNSTCLVKNLRNKAHYYQAAQELYHNVTEIYPNADIWLTGHSLGGVVTSLLGLTFGLPTVTFETFPEALAASRLGLPTPPGYHIGDHKNRPHTGAYHFGHTADPIYMGTCNSAFSGCTIGGYAFQGKCHTGSRCFYDTMEDFGWRSGIGTHKISNVIHDVIEKYKTVPKCEQDLDCIDCYEWKFFESNGTETTTSSSSTATSTTRTRTETCKTPGWWGCLDESTTVPATTTETITTTTCLSPGWFGCKDEITTTETTTITSGIATPAPAPSVTTTSAAASSSAMTSSAPTATATSTSTCKSPGWFGCHDSTTSTKHSATSTSISSTSPASTSTASHTCTSKEFFGLICVDPSATQNKPEPTSSHKKCVKRNYVGKCKEWSYGEGRDVKTDL

SEQ ID NO: 2705 - protein, 728 aa, Aureobasidium pullulans
MHTSTALVPLLAQAAFGAATRFVPRAYNVSFTPDQTRWPSGLHLAVDYYPSQWPEYMWESDVAAMRDANISYVRVSEFDWEVLEPSEGVYNFTLLDTTLELFGKYGLKAIVGTPTAAPPNWLTEKYDVNFVDRTNQTLIFGSRRHYSFSSFDYRKLSQGITQKLAQRYGNNSNIVAWQLDNEFGCHDTVRSYDHNAITRFRTWLKEKYGTIENMNEAQGRVFWSSQYVSFDTVQPPFLNVYMPNQAQLLDWYTFSSEMVIEFAKEQTAIIRQHAPSHAVTTNFMVSYTDFDHFKFNREVGLDLATFDNYPLAGVSEGAEYLRTGLPDLQALQHALYRGIAGSAYGENNGPFGVMEMQPGVLNWNTYRVSPLEGMVRLWTLETFASKGDLVNYFRWRQVPYAQEQTLSGLFVSDNTPDEGFGETQTVAGEDLPALRQALESEETTADVALIFDYTSVWVWSIEPYSGSYSPLDVGFENAGLAYLDLVSTFYTSLRRLGLNVDVVSPDQAISGYKMVVVPSLPIIPEAFNTALSSYNGTVVLGPHTGSRTPEFAYPPGLNPSAGTIRDKLPMKVTRVETPPTYANSGVSYAGTTYNISLWEENIICTRDNATSTASISSTSAHRKNKPAACSANNFHYLAFNPPADLLVSYIGDAAAKAGVKDVFGRSASKANDLGENLRVLERGGLVWAFNYGAETIETPKVNGSVVLGGSGSGNGTEIEGAGVRVWKL

SEQ ID NO: 2706 - protein, 584 aa, Aureobasidium pullulans
MWSRSSKSLLALSIAGPALSTPILPRYTNSTSSGVVCNGTFSRISAQTWVDGMNPGWNLGNTLDGIPDEGDWGNPPVVPSTFDDVKQAGFKGIRLPVTWAYHFTTEAPDYDVDPAWLQRVSDVVDMVTERDMYVLVNVHHDSWVWADVTKAGANYTQIEEKFYRLWYQIGTKLACKSSLLAYEPINEPPGTTAAHAAELKKLEDLFLKAITDAGGFNPDRVVTLNGLQENSDLTSQYFVRPTNITNPWAIQYHYYSPYPFIFSAWGSTIWGSEADKAALEADIANIRNNFTDVPLIIGEWAASPVATETAARWRYFDFFVRTAAKYNTTTVLWDNGADFLDRANHVWRDQTAIDIYMSAVAGEANALPDSTTDPSAATQFTSADLFVRVGQNVSSQTLPYILPSNISLISISGADGTALTKGSDYSVSGDDITFSASFLRTYFTSASSPGSVANLTLDFSSGADLTLNLVLWDTPVLSSTSSSVAAANGSSISIPIQWKGINKPATVKAVTANGTYLVDDFTSYYGPLQNARTTYNSQWNWDTDNVIITAAAVSAVQALGQDVIFTFEFYPRVPGNAVNYTLTV

SEQ ID NO: 2707 - protein, 390 aa, Aureobasidium pullulans
MVTIKSLISVFSLGLLGTAQAYSRGECQYPTQNPLQGCPQGTLLVGAGQKFTSIQSAVLSIPNNTVPYYILILPGNYTEQVNVTRPGPLTLLAQTRYPNDNTRNSVNVIWHNATGTASTGSYDNAYTSTLTIAPTFNSSSTGSGPTGNQVPAGTPFGNTDFRAYNLNFINDYLPYSAGPSLALSVSYANAGFYYCGFYSYQDTVYIGKLGNAYMYNSTVAGQTDFLYGFGTLWIQSSLLSLRSCGGGITAWKGTNTTFVNHYGVYIHDSFVRAANSSLNIVGKCALGRPWNALHRSIFANTYLDDSIEPSGYIKWSATDPRVNGNTTMAEYKDYGPGWNATGRAAGNVTIVMTDAEYAPYSTLEKVFQEPFTGKFGNTKWIDRKPVVHGN

SEQ ID NO: 2708 - protein, 445 aa, Aureobasidium pullulans
MRLFSCLLAAATAITSAVAYDIPDGASISVPWRHTGRPGFGWGNQKDKWGNKIEDDRRKITIRASEDDTDDISADFVWALEQAQNGGLVHLEEGKTYIIGKKIDLPVLNDVYVKLDGTLKFTDDVAYWQSNYFYYPFQKSITFMVWSGKDIRIYGKGTMDGNGQAWYNGFAGREILDSTNTYYRPILFLTDNATNVDVEGITFLNSPCWTTFLVRTKDVSFDNVYIEAFSNNASALPKNTDGFDSLNVDGLTVTNTRVNVGDDCFSPKPNTTNIYVENLWCNGTHGVSMGSIGQYPGVKDYISNAYLKNITLLNGQNGARLKAWAGPTAGYGYIDNITYENVHIENTDAPIVLDQCYFNINETTCAAYPSNVNITNIKFINFTGSSSGKDGRVVADLTCSPGATCSEILLEDINLTSPNGTAEIVCNNIQGDIGVDCISAADADD

SEQ ID NO: 2709 - protein, 344 aa, Aureobasidium pullulans
MPSNTLRLLCALALTSWASASPAALPRQLTYRDSVNYQFNPTSRNLAVYYGKAQNTDSPSLYDLCTNSNVDMIVMGFVRQLNGPTALPSFGFTRYCKTPATVTDKTRVSCPDMAANITFCQSMGKKVLISLGGSVSNLTLDSVSDAHEAASILWNVFGAGANSTALRPFGNVAIDGFDFDFESGADTTYMDTLASSLQSYFRSSSPERYISAAPLCANNTVLPYGLYANANFVWPRFYNAKACCFGSKGFNKSVSTWYNYLNSINSDLGPTYPRVYLGGLSFNNSNSGFMEPDAFVNATFTGRRLVQSNFGGVSLWEGTDGLVTKNAQGRDFLNVTKAGLLRDI

SEQ ID NO: 2710 - protein, 800 aa, Aureobasidium pullulans
MYNLKSSVAALVVLGQGIAAQNSSWDHSLYTSSPGVFPSPNTTGIGWEDALQKAKSWVANLTLEEKVGLLTGEPKGPCIGNIAPIPRVGFPGLCLQDGPLSIRQATFASVFPSGLTAASSWDRDLIRQRGEYLGAEFRDKGAHVALAPVAGPLGRSADAGRGWEGFSPDPYLTGVAMEETIEALQEAGVQACAKHWIGNEQETQRNPTLSPTNKTIEAVSANIDDRTMHELYMWPFANAVKAGVSSMMCSYNRLNSSYACQNSKALNGLLKEELGFQGYVMSDWGATHAGVANIEAGMDMDMPGTIAFFQAGTSYYGQNLTNAVNNGTVPESRIDDAAHRIMTPYFFLGQDQDFPLIDPSSGPINILGVQPYLDSFQYGEANVDVRANHADLIRKLGSAGTILLKNTNNVLPLNKPKNIAVFGNDAGDPENGLYSLSLTGNGDYEYGHLAVGGGSGTGRLTYLSTPLDALKVRAKQDGTNLQWILNNTLLANANTAAGFGAIYPQPDTCIVTIKTWAAEGNDKANLLPDYNGTQVVENVAAWCNNTIVVTHTSGPIVMPWADHPNVTAILAAHFAGQESGNSLVDVLYGEYNPSGKLPYTIAYNESDYAFARITNSTELRLTEDPNAWQADFTEGLLIDYRHYDYYNLSVQYEFGYGLSYTNFSMSDVKVQRLAPQNLTARPTNAGTMPGGNPTLYDTLYEITVKVKNTGSIAGDAVPQLYLSQPVNPSFGLTPVQVLRGFEKVALGAGQSRTVTFPLQRRDLSFWDAVQQQWIIPSGNFGVRAGFSSRDIQATSGFSAL

SEQ ID NO: 2711 - protein, 559 aa, Aureobasidium pullulans
MRFSLLQIGAALGLAASVGASSSPGRNVFERAEKLTAKSPIIEKREIGKPFEHPRLQKRASPYLNNATEKFWVNGSAIPDVKFDVGESYAGLLPISGAANETRELFFWFFPSTNPNATEEIAIWFNGGPGCSSLSGLLTENGPFTWEAGTLEPVQNPYTWVNLTNMLWVEQPVGVGFSQGVPNITNEIELGLEFAGFYKQFVDAFGLHNWKVYLTGESYAGFYVPYIADAFISLADTVYYNLQGIAINDPIIGDETAQQQAVIVPYVDYWENVIYLNETFLKQIHDRADQCNYTSYLEKYLTFPPPQEPFPLLPDPYESDTYACDMFDTVYEAILLVNPCFNIYHITETCPHPWSVLGGVNTGDYIPSGEVVYFNRTDVQKAINAPVGTNWQQCTNVNVFGGATNNRSLSDTSKGPALDGTLQRVIEYTNNTIIGSGNLDMLLSTNGTLVAIQGVEWNGKRGLQEYPGKEFIVPYHPEYNGGALSGAGKVGYYGSERGLTFYTAQLAGHELPGYAPGAAYRSIELLLGRIDSLAYDGDFTTQTGNFTGNGTIYAQQQLF

SEQ ID NO: 2712 - protein, 333 aa, Aureobasidium pullulans
MKVLLTGGSGFVAQHCLRLLLKHGHDVVTTVRSAEKGQQLLSANPGLPTTKLSYVIVKDIAEPNAFDKAIISSPPFAAVLHTASPFHYAATDFENDMLKPAVNGTLNILNAIKAHAPEIKKVVVTSSFAAIINMQSPPEVYDESMWNPISWEQAQTNGATAYVGSKKFAEKAAWDFMAVEKPGFALATVNPVLVFGPIMEGSLTSLNAVNTSNVVFRDMIQGRMKDGITNGSFSWVDVRDVAAMHVAALEKSEADGQRFIAAAGRYSNSEIASIIKKHFPSLQDKLPEHIELESSKAGYGIDNSSAEKILGVKFRDLAHAVVDTVDSLLKVEA

SEQ ID NO: 2713 - protein, 328 aa, Aureobasidium pullulans
MIIKPLLSLVGLTAPSKNIWANTTNVIAFGDSYSYVLGTSGRQNYSFIGDYQNLGFSSQTLLNNKIVQSQTSTAEGGPNWLEHLTGCGVNAGTTSPLDCNIQLWDFAFAGADIGTQYTPRHKYFTVPLVNQTQQFLTYAQPALANITTPESTLASFWIGTNDIFDTATSTVPFKTVYANMIATLFASMQTIHDAGYRNFLVMNLAPLDKTPKNVLKRRPLPNTNMVNQFNSILANQAAAFQKKNADSNVALFDTNTFLNGVLKNPGQYGIKNTTGFCAAWNQPNVVANAGQYGCQPMDEYFWFNTAHLTTHVHEILATEVQKFLSGSS

SEQ ID NO: 2714 - protein, 459 aa, Aureobasidium pullulans
MLFQPLIAATLLSAITAVASPTWSAQQEYTKSLPKSVSKHQGTRPKTDISPKKPFKPFPSSPSRNKVCYVSSHNDGVTDDSEYILSAINKCNNGGHVIFSQGQKYVIGTALNLTNLNHIDLDIQGYVQFTNDTDYWQANAFKQVFQNATTFFQLGGNDVNVYGGGFLDGNGQVWYDLYAQNIYVLRPILFGAVGLHNSTIQNLNFRYSPQYYNWVANSTNVLFSNISISGSSQSKNPAKNTDGWDTYRSDNIVIQNSVINNGDDCVSFKPNSTNILVQGLQCNGSHGISVGSLGQYPTETDIVENVLVYNISMSNASDGARIKVWPGSPAALSGDLQGGGGKGRVNNITYDTMSINNVDYAIEVTQCYGQKNLTACNEFPSKLTISNIVMKNIHGTTSSKYNPISGYVVCSSPSVCTNIKLSDINVSSPNGTVNEFSCGDVDESLLQGIQCTTINKGYN

SEQ ID NO: 2715 - protein, 1040 aa, Aureobasidium pullulans
MIPLRPLLSLLSVASTTLAIGQNATVAFNASAGSLSLASGGSSVQIMADSNDWPAALKAAHDLSQDFGRVTGTNGSMILSNTSDTSGVPAYNAGSYFSGNPNNASMIFNITGLTTFATTAPGAKGGVIIAGTIGNSSLIDTLIQSGKIDVSAINGTWEAFTSTVVSNPMEGVDVALVIAGSDRRGTVYGLYDVSEQIGVSPWYFWADSPPHKHDSIYAMNITKIQPSPSVKYRGFFINDEAPALTGYVNEKFGFNEYGSNYGADFYHTMFELLLRLRANYLWPAQWNSMFNVDDPRSQNMADAYGIVMGTSHTEPMMRSTKEWSEFGNGTWSWATNNASIYPFFVEGAERLRPYEGVITMGMRGSGDTALSAGIETQLLENVVSAQNDILAQVFGNASASDPNSIGKLWCLYKEVQGYYEAGMTVPEDITLLWTDDNWGNIRRLPVGNETSRIGGAGVYYHFDYVGDPRDYKWINTVLNQKTWEQMHLAYEREARNIWVVNVGDLKPLELPISHFFDLAYDINRWDKDSTSEWLELWAAREFGPEVAAQTGALMNTYSLLAGRRKFEEVDPNTFSWINYNEANNVLAEWTAIQKTAQSILDKLPAATQPAFFEMVYHPVTAARTYYDIMISAAKNNVYAQQGRTSTNAIAQHVQNQFTYDHQLSKSYNQLLGGKWNHMMDQTHIGYQYWQQPMRQALPPLQYVQMAERALTGDLGIAVEGSNATVPGDDRFHSLSSMTLYLLTLDPYGPARWIDVFHSGTQKVTWNVQSSVPYLNFTQKTGTLSPNGTTDTRIWVSVDWSKVKPGAINSTTINITSSTDYGTQYSVPKVVISYNNTAAPSNFTGFVESDRTVSIEAEHYSSISNGGNSSVSYEVIPGLSRTLSGVTLFPVTADSLTPATAPALEYDFYTFSNLSSGVLMDQNMGTSSKYTPNTVNVTLFLGTSLNTIPDRPLRYAVQVDDQQPQARQYIFDQPQGANPTGWLTAVADVIWYNTTTWNYSGPGAHKLKIWELEPGVVLQKVVVDLGGVRKSYLGPPESHRV

SEQ ID NO: 2716 - protein, 549 aa, Aureobasidium pullulans
MRVSTVASAALIAGSTQVQAAPTFGLVFGLLKGITTAVHTDINLLLGSLGLGFQTNANIHGQALGYGGIGCPFSYNNQAGVSVSAGLHGGLSHNIGWSAGIEGRNFINWKNFKGNGVTLSGWLVQDKTLDIDWWNKYGSDCDDEWSLTAKLGGQAGAVLEARYASYITTSYIDSLAAAGINLLRIPTHYSAWISVPGSGLYHGNQQAYLKTICDYAIQRHGMHIVIGLDSLPGGVNGLATGERIGATAWFNSAENLSYSFKAIDAILGFISATGHVNAFTVSPINEPCDVTANFATTGGLSLQATNFINTYVQGVLKKIAKLDARIPCMLQDGFLGHDYWAPFFSANANLVIDSHVSFAGAVGAGISAGVSAGANVGAGVNAGVNAGVNAGVSAGAGLGAGISGGVHGGLGLGLGSSIHSGLGAGIHGGIGAGAAVSVKGSLPKLSAHLIAPSVCKQASLLKGTGKFPVFVGSYGIQAQDGNTLSGRKTVYNTQKYAYAQQLSGGSFCHAKAYSNSVSVSGEGCASDYNSFQGLMSAGVATKNTESCYC

SEQ ID NO: 2717 - protein, 411 aa, Aureobasidium pullulans
MHIPLLLLPVLGALTQASPIISRASSWPNAPFTTSGRDIKNNLNETVTYAGVNWPGAADTMIPEGLQYQSVSTIMTKIKDLGMNVIRLTYAIEMIDDIYENADTSLKTAFIQALGETNGTKVLNQVLISNPSFTENTTRLEVFDAIAAEAHAQQIYVHLDNHVSKGIWCCGHDDGNAWFGDTYFNVTSWKRGLAFMASHASSWPAFTSISLRNELRTTTNGTGDNWVSWYENMIPAADGIYAANDQPLIFFSGLNYDTQLGTIVNGNDIGNGTEFSIHDHAYADKIIWELHNYANSATSCGSIRSSLRNQGYNAMEGGNVTNKAPVLLTEFGFDQNTASQSVYAQCIKEYLTGLPGGPGGWMQWVISGSYYIRQGEQDKDETWGLLNHDWSEWRNQTAADYTKSFVDATLV

SEQ ID NO: 2718 - protein, 436 aa, Aureobasidium pullulans
MGYRSLPASPEQTLDMFSSLLSVVTSALLATTAVAWPNVPSAPFVQNVTVFSPPANWPNKGGSYARSVLLNQNCEKGNPTILATAAYQPPDGQYLIIHKSTDFGATWSELSKAYFNGNASLSGGIILQPFLYELAQPFGKYQPGTILLSANYIPGDFSSTNIQLYASTDKGASWEYVSTVAAGGPPNTDNGAPCVWEPFLLAYSNQLNVYYSDQRDPAYGQKLAHQSSGDLVSWGDVINDVAYANYTQRPGMITVAQIGNGKWMCSYEVGLWTDPVTGSNDSAPYATHYKIADSPLDFGPVGDSILKTPEGISSAGPYTVWTPAGGPSGTIVVSDSSYDQFFLNTQNGAPGAWKNVSSQGHGVGYTRSLSVLSGNGGKTVQVLNGGMYGSNMTLFSAGDFIVPGPAGHGPGASGFPACNHNSGGYGHGWGWGSPWW

SEQ ID NO: 2719 - protein, 330 aa, Aureobasidium pullulans
MFFSKLGLLVLSGASAVLGASYSNPLEPKDGGDPSIVWYDGYWYFTATNYRDISVRRATTLDGLKTALPKTVWAPSAEFPTRQCNIWAPELHIVDGQWHIYFSAGGCGDGSIQQSQVLRGGESPWDNFDFHGTVNAPAWSIDGTPLTINGQNYFVYSCFRSDTGENLQSLCIGKNSDILTIGEEHLLASPTEAWERNGQMPVNEGPFALYTKNRTFLSYSGSFCWDPSYSLGLLEYVGGDPLEQSSWVKTGPHFSQANGMYSTGHNSFFASPDGTETWMAYHSSPNPAGSCGDRYSNAKKIDFEADGFPILGAPVAEGEVLAGPAGEPAA

SEQ ID NO: 2720 - protein, 523 aa, Aureobasidium pullulans
MKSVVGHALAWLQAPLAPSSLENAPTRCSADVLAKPDLFGAEIINISAHEVIGHSTIRTSALEATASNGSSLDFCNVTVTYTHPGQHDTIQVTVWLPLENWNGRYLAVGGGGWITGLPYLSPALELGYAAASTNGGHGIERSAASWALTSPGNVNWNLLQDFAYRALDDLAVVGKAITTLFYGTAPKYSYWNGCSTGGRQGLMLAQRSPKRFDGIVAAAPAIDWPTFVISAFWAQQRMNRLNAYPSTCELNGFRAAAVEACDELDGLQDGIIGAPGLCDFDPHTAVGRTIECDGVKQILTSEGAAIAQAAWTGPINADGKASWFGVNYDAILRSAADAIVTRSDSMQGRNPTIPEEWISLFVKKDPSYDPANMTDAEFFSVLKASQREYDSIIGTNWPDLSQFRDAGGKMISWHGLADDRIPPNGTSHYYDRVLAETSNVSDFYRYFEAPGVGHCAEGAGAVPNALADLVKWVEEGIVPDTLKATGQNGDSTVRELCQYPLVQRYLGGDPKVASSFKCAASFA

SEQ ID NO: 2721 - protein, 337 aa, Aureobasidium pullulans
MSSCRALRILGQSLSLLAILSPLSVAAASKDEFKTMCAAFGDSSAAQFAGASSDTGKYLYGSNQWGWDDSGAQCMTVGLDDSDDAASFNVTWSWTERDVWVHSYPNVGLESVQLPSRLDNVKSFNVSAAWDMYPSAQPDAVNKTEALMAIGTKADIALDMFIDSNNVTAMNASAAAFEVMVWSAVWGGVAPIGYQTFNRADAPKYTLAGIEYALYSGFNQQGQKQAVFSWVPAENQNGIDANLWELVTYLVNAGNLTADMYLGLIQFGTETVHATQNVTFEMQKAQMDLAVVSQKPTTTKGSPPATAGASKGAAFHVAPTGFALPAAAMGIAAAVLL

SEQ ID NO: 2722 - protein, 540 aa, Aureobasidium pullulans
MKGIAGLTLLPLLAAAKPVFKADTLSHQSIDNDAAPLISSVDAETIPDSYLIAFKDHVDHRDAAAHHNWVQDIHESTLNTKLELRKRSQAPFVDTVFDGLKHTYNMAGLKGYSGHFDEDVIDKIRKHPDVAFVEKDQIMHTLAKSEDPAVEKGAPWGLARISHRDSLTFGTFNKYLYSSDGGEGVDVYVIDTGTNVDHVDFEGRAKWGKTIPQGDEDKDGNGHGTHCSGTVAGKKYGVAKKAHVKAVKVLRSNGSGSMSDVVKGVEYAAESHIEEVEKAKKGKRKGFKGSTANMSLGGGKSALLDQAVNAAVDAGIHFAVAAGNDNADSCRYSPAAAEKAVTVGASTLADERAYFSNFGKCNDIFAPGLNILSTWIGSETATNVISGTSMASPHIAGLLAYLLSLQPSKNSAYAVAEITPKKLKADLLSIATVGALEDVPSDTANILAWNGGGSANYTEVISAGGYKVKNSQREYGLEELKAVTKTDFAHDAYKKVQEMDASTIREDMRESFEAARKEIGRLTAKLESEIDEFLVNSKME

SEQ ID NO: 2723 - protein, 323 aa, Aureobasidium pullulans
MKFASAVLLALSAVSTALAASFTNPLRAKDGSDPFIVYSGDGYYYLLTTEWTNIQVTRSKTLGGLKTGETKVVWQDSTASRCCNVWAPEVHWINNAWYIYYSASNKDDLGTQRIHVLKGGSAIFDTYTYAGQLFNEWSIDGTVLRFSDKNYFVYSCQRTNLQSLCIAPMNSPTSVGTPKTLSQPTLAWEKIGEFPVNEGPAALYHGGKTFLTYSASYCWTSSYQLGLLTYKGSGDPTLSASWTKSGPVFSSANGNYGTGHNGFFNSPDGKEVWNVYHATANSAGACDGNRYTEAQRVDWNSDGSPNFGKAVKLGTTLNGPSGE

SEQ ID NO: 2724 - protein, 225 aa, Aureobasidium pullulans
MKSFFIACLAATSTLAAPLAVPQFGGFPSFGGGFGGGFGGSTKNDVTSGVCKPVTYIFARGTTELGNMGSTVGPALEKALESAFGANNVATQGVTYPADVAGAISGALNPGSAQGARTMASLTQQALSKCPDTKVILAGYSQGAEQVHGALQNLQNGQVAVALTFGDPLQRMPFRNIDSGRTKIYCNLGDGVCAGAFIISAAHLSYATQDATPAAQFAKGVIGNI

SEQ ID NO: 2725 - protein, 379 aa, Aureobasidium pullulans
MKLATSLIGAFVALAQVVTSEAVVGKADGFAYGVIGGAHASPDYPADIEELKSMLTDATPRVIVLKKTYDFTQSEGTIVGNVCLSWGDGHSCQQIIQDDCGDTPSMTAKWWKAPTQPIDVASHKTILGVGNKGVIRGKGLRFRGGASNIIVQNIQVSDLNNKYVWGGDAIGFDGADLIWVDHVTTHNPGRQHYVFGFNPSTRVTLSNNYINGNSTYSTSCDNYHYWNFEMVGTDDQITMKNNYMYRTAGRAPALSGGTLLHAVNNVWSDNGGHLLEGGDSKARGIFEGNVFTDINSMVADYAGRLFGTPAGSESKCKSALGRSCQTNSYKQSSGSLDSYTDTSFFGDFSGLHIASAGSAAQAASSVPQNAGAGIINVGA

SEQ ID NO: 2726 - protein, 370 aa, Aureobasidium pullulans
MHFSSLVAAAAIGGAAIVSAAPAASPIDKRATTCTFSGSSGAASATKSKAACATIVLNNVAVPAGTTLDLTGLTTGTHVIFEGTTTFGYKEWEGPLVSVSGTSITVTGASGSVLDGDGARWWDGKGSNGGKTKPKFFYAHSLTTSSINGLTIKNSPVQTFSINGAKTLTMDKITIDGSAGDSLGHNTDAFDIGSSTGVTITNAVVHNQDDCVAINSGTSITFSGGSCTGGHGLSVGSVGGRSDNTVSDVHFTNNKVINSDNGLRIKTVSGATGKVSNVNYSGNTLSGIRKYGIVIEQDYENGSPTGKPTNGVPITGLTMSKNTGTVTSSATDIYILCASGACSGWTWSGNSITGGKKSTSCSNVPSPASC

SEQ ID NO: 2727 - protein, 290 aa, Aureobasidium pullulans
MKFSTTFVTCLALASGVKPAPVATQRNGSHGARMSALAMSEKGDAVNDRPSWRSSNWSGGVLQGSDFRTVTGTFTIPNITMLYPGEPTNRTHSVAVWVGIDGIHDCDTLLQTGVDLTMEKGIPKFKAWFEWIPGPSTDFDHELEFSVGDSVNMTVTATSKTGGIAMVENNSKGTPVNHTFANETAELCLANADWIVERWTLTSTHQDDSGQSYRHSTQVSPVDFDTLTFTNASATTANGSSLDACNARTEAVDLYENVVKDNRSSYRLQMATTFDDSSITVSYVRGDHVK

SEQ ID NO: 2728 - protein, 246 aa, Aureobasidium pullulans
MKYLAAVLGCATLAAAHGYIDNATIGGDEHQFYQPYLDPYMNPAEKRVSRPVQGNGPVTDVDLLDIQCGGYSEGGIVGSSPAPLEAAAEAGSNVTLHWTLWPDSHFGPTITYMAACPDEGCENFMPNKTAVWFKIAEQGRSADKKTWGTDPLTKPGNAGYTYTIPECIKAGHYLVRHELVALHDAAQYPGPQFYPGCHQIKVSGEGTTVPKSLVAFPGAYKGQDVIYDASKAEYTVPGPAVFQCAA

SEQ ID NO: 2729 - protein, 651 aa, Aureobasidium pullulans
MHFQKLSGLCLLAFASVSWADAVPEGRYLWGADRMGKMVRRATTKTSTTSTKASTSSVKASSTSSVKASSTSSASSKTSSATVISVSSSTPASSVSSASSSTSLVADAACTNGPNSRQCWSGGYSIKTDFDLKHPTTGNTVTYNLEITNTTCNFDGNGDMQCYLINNQFPGPTITANWGDQIVVNVKNSLQNNGTGIHWHGIRQLNSMGSDGVGGLTECPIPPGASRTYSFQATQFGTSWYHSHHSSQYGMGITGQIVINGPASSNYDIDLGPLPINDLYYGLANNVNEVTLHNLQQNLPPPDGSNILVNGKGKSANGGSYSQMTLTPGKRHRLRLINTSVDNAIRVKLDGHNFTVMSADFIPIKPITGQNWLLLAVGQRYDVVFTASQGSGNYFFRAEVATDCFSGNTGKGRALFTYSGTTAAEPTDSNEAAPTNGCTELNTVPYWTQAVDQSQYASQVQTLNTGVAPGLTTNGQNFALWNLDTRAMMVNWDKPTAEYVFEGNTSYPDPYAVLEIPTEGTWTYWLIQMGQQNPPLPHPIHLHGHDFFVLGSGAGVFDASTAVLNFANPPRRDTSILPGLGWLLISFPANNPGIWLMHCHIAWHISEGLGVQFIEAKNSIVMPDKTAFNSQCDAWRSYSKNMLYPQIDSGL

SEQ ID NO: 2730 - protein, 228 aa, Aureobasidium pullulans
MSSILAWTKAACLLLLASEAFASPIELEKRAVCTAYTLIETRGTGEPQGPSNSFKTMDAAIIAQLAGGTEYNTVYPASIDQNSAKGTADIINQITTGLKSNPNRCFILEGYSQGAAATVDAMSKITGANFDAVKGVFLIGNPHHKSGLACNVDSNGGTTTKNVNGLTVLVGSIPANWVSKTLDVCAYGDGVCDTAHGFGITAQHLSYKSDANVQNQGIKFVLGKLRGT

SEQ ID NO: 2731 - protein, 830 aa, Aureobasidium pullulans
MKQAATNLLALASTAYAAASSPAGTKSGCYWNTDAGQFNTRFGHDFSIDLYGTVENLIPSTYTVNQGVNPLARRFDIANIGFDGVEKALTLTVPGGQSNGPISVAQLATSYSDILYGSVRTVAKISNVPGTTHGFIFYANDTQEVDFAFLTSDTSKAWLTNEQVTYTSPYSTYSVAAPGDASSAYHEYRLDWLPGVSKFYIDGVLVQTITDNAPSTPGSWIWNNWSNGNAWAQGPPLSDSVLKIRSIDGYFNRTTVADNINLNPSSCPAVSSSSSSVAPSSTVVSSSSSSVVSSSSSSVKASSSSVVSSSSSVAPSSSSIVSSSSTVSSSSVATTSSATLSSSSSSSSSVAPATSSSAAAVTNFYIKDANNKLVNVPSGQDGVANYVTSQNSATSFYIDSKTGYLYETGAPYAANRGTSAKPEITYFSTIGLGYSYITCSQNTAQTWLECKANGVAQQAMTCGNDGLLYFAPTIPSTCAWVPLYYVSSTSASVSASSVASTTSSSSSSSSSSVAPTTSSTSSSVAPTTSSVAAQATVSFTTVTTAWTGTFTTTTTAVSGLAATVYVQTPAKKGDVISTSSTAKASYTTVTTHSGTAGSVGYITATPKVAGATTTVTVVYPTPVTTCGNQGINFAAYTNKYSGGQATYGYPSFSPETYKKVSPWFSDDTTYIAESNDGSGTKINVYGYGPLDASTLVLDHTFYLFASQTGYYSLNVPYTDDIQFVWVGSKAVTGWTRANADITQFWSSQIATQTPQTLAYYLTVGTYLPIRTLFANGGGQGDLRFNIYAPDGTSVLSSNAGQNSGVSSVDIVEFPCNSALGAQFPAWGKET

SEQ ID NO: 2732 - protein, 496 aa, Aureobasidium pullulans
MITSTWTSALVAAAFVPSIVSAVPHGGHSPGKGHGIAADDFVSVDGFKLKDRQGTVYLTGLNYWSCMNLAADDHVGGNYSRFITELDQMKAHGVNHLRIMAASEGAPTHQPFRMYPALMESPGNYNEAIFVGLDRCLNEMSKRGMRATMTLANEWQWSGGFGQYVSWATNNSQIPYPSSWNLTANPQRSEPGTGWGNYTVEGVDAESYGNFTAYANRFYTIPKCQEWYHAHISKILNRVNTVNGRKYKEDATVMTWQLANEPQPAVVPTEYLGPYSLELPAAPEDVIIPWVKNSSAYIKSLAPKQLVNVGFEGKQGKWYFQAVHNFSTVDYGTTHCWVQNWGVYDMLNSSAANLEAAKSFATAFVANSSEWSREIGKPVFLEEFGMARNNWENIGKEYPYLSSAGTGNKDEYFTAIIGAAMNDFKSENGTYVGSCPWAYGGLYRPETQHANAFGEVWAGDPPHEAPGWYDLYDTDEAMNIVHRQQQDIAQYLSKGH

SEQ ID NO: 2733 - protein, 527 aa, Aureobasidium pullulans
MLSQTLGLAVLVLPLLAEAKDCSQAAFQKIIPSNSTFNYVTKVAAGGTFTDAYANANATGLPEGCAVSVRVPTPGNSSYNMAIYLPNKWNSRIMTTGNGGYAGFTNWQDLGIYSQYGFAALTTDTGHDNANPLDSTFALNKGSLENWGWRAMHGSVLVGKALSAAYYGENHKYSYYSGCSTGGRQGLKEMQVSPEAFDGLFVGAPAWWIPHLGIYTSQATLGNLPQNSSHHISAALATVINDEILKQCDPQDGVTDKVIMNPEGCVFNPLTLLCENSSNTSACITRPQLDTLYKALHDWTYFDGTLIFPAPSLGTPLTAYIGDSPLPNPMGTGMIQHLLLNTTEPYDWSTFNESVVRLSEAIDPGNASPDDYDLSTFQKRGGKVIHWHGTSDPIIPYRSSTYFYSQVASSVAPHGIEMDDFYRFFPIAGMSHCSGSQYSPWYIGGASQPLTNVSHGVPGFDDSQHNGLLALMRWVENGTAPERLIATKYNEDNPAKGVYRQRPLCPFPKQPVYTHGKIDSASSWKCV

SEQ ID NO: 2734 - protein, 381 aa, Aureobasidium pullulans
MSSIKSLALLALATGFASVASAAETGKTTRYWDCCKGSCSWPGKADVSAPVTTCDKNDSPLTDANTASACDGGSAYMCSDQSPWAVSDDLAYGFAAVNIAGGSEDSWCCSCYKLTFTTTSIAGKSMIVQATNTGGDLGSNQFDLAIPGGGVGIFNACTDEYNAPSSGWGAQYGGISSNTCSTFPKALQSGCNFRFGDWFEGADNPEVEFERVACPAAITAKSGCKRTDDGAQSAVAAPASSAVASSSVAQAKVAVASSSAVASSSSETAPSAYSTSEAAPVASSSSEAAPVASSTSSEEAVAAETSSVAAVSSVYTAPAVELSAAASSAYSAPAAYSSAASSAYVASSSSVAAASSVAAPSSTAPSDHANCNVQYVYEYDL

SEQ ID NO: 2735 - protein, 732 aa, Aureobasidium pullulans
MRSFFSTITLLGFLPGLLALPTKADVQVQPLEKRGTRTTAPKGCLSVGSGATYTTIASAIKALGGSKNDACLYIKSGTYKEQLTIDYAGALTFYGETADTSSYKSNKVLISHGISSPAAGSLDASSTMNIRAANFKMYNINVENSFGKGAQAVAVTANANKLSFYGCSFLGYQDTLYVKTGTQYYSNCLMKGAVDYIFGDASAWFDSCTIMSNGPGAITASSRTTSDDTAWYVFNNVNVISDGTDLVGKVFLGRPWRVNARVMFQKSQLSNVVNAAGWTEMADGATPRYYEYKNSGVGSNTSKRKWTINASAAISINTVLGDSYSSWVDQSGTGSSSSSTSTTVSKTAAAKQVTPAKSAVAKGPVCTPTAGGAATKDDTPAIYAAIQKCGNGGTIVIPAGKTYYLNTVLEFDGCKSCAFQLDGTLKASDDLTYWEGKTAILHLKSVPGLTFTGAGVIDGNGQKAWDHFATDSSYKRPTLFYIDGGDNIKMDGWTMINPPNVFHSVKGNALNIAYSNLNMSAVSTSKNLPKNTDGFDIGASTYVTLTDITVLNDDDCVAFKPGSNFTTVIGITCTGSHGLSVGSLGKSNADSVSNIYVSDATMISSSKAVGIKTYPMGNGHGISTVTNVTYTNIKVQNSDYAIQIQSCYGEDGTYCETNANNAVLKGIVFENFSGTTSKKYSPTTANLNCGAKGTCDVKVKNYAVKAGSGTGQVLCNNTPGSMGVACTKGASG

SEQ ID NO: 2736 - protein, 483 aa, Aureobasidium pullulans
MFGKKSLSYLLLAAAAQAKYIVPGGRWTDTDGNLVNAHAGGVTVGKDGKFYLFGEYKTQGQTEGGGISVYSSDDLATWKSHGLALEPIEGHPYIAPDKIIQRPKVLYNAVDDQYHMHWHADNSTYGWLLQGLAISPNITGPYTFLNATAPFGNWSQDFGTFTDYKTQKSYALYSNGDRKEARDVYLAAYDDSNTELAEIVHRFDKYDLEAPTIIQTDSSYYALMSHKTGYRPNNVVAFRANSLAGPWSQPFFVAPLGTRTYNSQSGFSLKINGTKKTTWLYMGDQWDSNSLWESRYIWLPVDIDDNKQTLKLEWYDIYDLDVKTGQYKEVKGKTYYAKDAVTAGDAFKQEANFASSNTIVTGISGNASTLTFSNIQGSGSPQWISFYYQNTDDMGFGDQPGGSPDRIKTPWALRRIASVVVNGNSSDIQTLYQRDTHKGIILSTPLKVNLKKGSNTITIGGLDNGIDVKGADIDRIVVYPAEK

SEQ ID NO: 2737 - protein, 271 aa, Aureobasidium pullulans
MHLSKSALSWVTGITSLIATSDATPLEKRVTTSPAAPFDGCLYQVSKVGAFNSRIAVTNWNKFPFTLKATDRTGGPARVRWNPANVGVDANDGSLTLTVPGGQATCSDDSPCGSAQITTAYDDIMYGSMRTVAKTPNVWGTVSAMFFYSDDNNEADIEIQTGNTTYAHFTNQDWYGDNALSNSSVVADTSAAYHEYRIDWVPGRTDYYVDGKLLQTYTKFVPRTSGYWMWNSWTNAGYWTYGPPAKDAVLHIKSIDVYFNRTSITTCGSAS

SEQ ID NO: 2738 - protein, 485 aa, Aureobasidium pullulans
MSYTLHLQILISALCLLFCKPSCATPNNGRLDLQLPFVPVKTPPLSKEHNFTLRHIYHKGSHRYPRLFRKIDIHHDSLVQDGTKESCCDGEATSTAFTVKSNALEIQRLSDRSRHSIDSLLEAGEFLGEPVSLTSDAWTIDRISGPDVSDKSTVLSLAHIAANAYVDPPHGGEWTDIGGGFNYTEDFGWERDGLRGHVFADTENKTVIIGLKGTSLPYFDDGETFNNDILNDNLFGSCCCGQGGQYAWKKVCDCQTSTNTCNSSCLMTSLRKKSNYYHAARHLYHNITAIYPDADVWLTGHSLGGVVSSLLGLTYGLPTITFEAFPDALAARRLSLPTPPGYRVGDVEKHYTGIYHFGHTADPVYMGHCNSFNSPCTIAGYAFQSKCHTGHNCTYDTVGDLGWRESIGTHRISSVIKDVIENYNATPRCEQDVDCADCSEWKFFDEEKTTTTSRIESSTSQTTTTICQTPGWWGCRDGTTSTTTF

SEQ ID NO: 2739 - protein, 615 aa, Aureobasidium pullulans
MSAAKLFLVAGLLASGAYASPIQARTPYAVKDSHFVPSKWRQVAAAPSTHNIDLRIAVKQNQFTDLEKHLYEVSDPDHSRYGQHLSELDVKKLVQPSDDSLALVHEWLADNGIEAGDLSYSSSKDWIKVSLPVHRIESLLDTKYNVYRHEDGSETVRAPEWSLPLHLHEHIDTIQPTNSFFRSSPKAVSLEVNKFGGSYSQDVTYHQDPNVTAICTPRGVTPLCMRTLYETIDYIPQVSGKNKMSLVNYLGETNNRSDTYLFLEKFRPEAKETAYEFQFDVINNGSTSQAKVTSRIDIEGNLDVQTMLGFSYPVPLTAYTVGGSPDFIPSNGTTTNTNEPYLDWLQHILAQSDDTIPQVVSTSYDDEEQTVPASYAKRVCEDLAQLGARGVSVFYSSGDSGVGGSGSCVTNNGSNAKRFIPEFPSTCPYITSVGATMDFKPEVVAYHASGYASGGGFSDLFPRPAYQDKAVKAYLKGLGDRDAAYFNASGRAYPDIAGQGSYFSTVWNGTDTLVSGTSASTPLIAALVALVNDALLAGGKPTLGFLNPWLYKKGYRAFTDITSGSAVGCSEIGDGKGFPAVEGWDPVTGFGTPKFRDIIHLLGVHGYWNHTGGWS

SEQ ID NO: 2740 - protein, 697 aa, Aureobasidium pullulans
MGKRILTSCLGLLVLGRCVFATPSTTQLGSVTILAADDLITTNNNKTSAALLLGTPLTLASALTACESLHENLWSPSLHPFTAGLNNSLAYEVFSGRVASSQLFWTGQSQSQPSSSKYAGSPSHSRPPHQPPQCQAIDVNGDTHHVSCKERLPVLCSQTASASNITYADNSPPYQISQAVGFQTLVGYRDFLTFRFMGVRFAAEPERFTHSSIYEGTGTNDALEPAPECLTLPNNGSTDCLFLNIWTTSLPRPGAKQNLKPVMVYIYGGGFTTGSASNPTNDGGNLAARGDVVVVDIAYRLSTLGFLALDDGVHKGNYFLSDQIAALEWVQKHIESFGGDPSRVTIFGESAGAESVNALMASPKGKGLFHGAILQSNYYQPYVPLVTAVNQSTTPILNLTGCRDAADQLACLQAYNATELLGLKTVFNYPVVDGTYLVSEFIDLNSTTDVTNRVPVIMGVNRDEEGVLGTVYPTTNLTTGIDDIAAANHLNASDILASDLFPLGASDNKNATLNVFNTTTRISTDVSFRCSNQFEAYAGVKDGVLPNIWFYEFNRTYQDPAYNPNLVCAAPVTPSYPYGDPSQEYFKCHAGDLANTFGNVARAGFPDRDGLDAKFGQLITDYWTSFARNHDPNPDMAYLKVRGYWNTIAQIEKSGAWEKVDVEQPMMMELQWNSIMMPFRDVEQCAVLGYPLDFLTR

SEQ ID NO: 2741 - protein, 989 aa, Aureobasidium pullulans
MRISLRLLVYTLFLCALVLATDNGLTTQVTWDPYSLMVNGERLFVFSGEFAYERVPVPEMWSDIFQKFKANGFNAVSMYFFWSYHSASRDVFDLETSGKNVQAVLDAAAEAGLYVIARNGPYSNAETNAGGLALWTSDGSGGNYRTSDQVYQDAWAPWIKALNKILVRNQITEGGPIILYQVENELQETVHKADNTLVLYMEQLEKVAVGSGIVVPLTHNEKGQRGQSWSTDYQDVGGSVNIYGLDSYPGGLSCTNINSGFNLVRNYYQWFQNYSHTQPEYWPEFESGFYQPWGGFWYDECLAEHDPAFADVYYKNNIAQRGTLLSLYMAMGATNWGNLAAPVVYTSYDYSAPLRETREIQLKFSQTKLIALFTRVSQDLLYTEMESNGTGNAVSTQDIWTWVLRNPNTTTGFYTTQHAKSSSRAVTDFSINLQTSLGPITVPDVQLNGRQSKIAVTDYHFGKNTLLYSSVDILTYGLFGSKAVLVLYLEQDQVGEFAFSGNVSIKSYGNTNVTTSRVKSNGTASYTKLVYKQTAGKTALQLSNGVLMYLLEVTTAWKFWAPPTTSDPNVAPDEQIFAIGPYLVRNASVSSNVVSISGDNTNSTTLEVYVGDASVNTIVWNGEKLPTKQTAYGALTADLASIVDRKITIPTLSGWKVADSLPEAARDYDDSAWTVCNKTTTRAPVKPLSLPVLYSSDYGYYSGNKVYRGYFDGKNAVSANVTAQGGSAAGWSAWLNGKLVGGAPGNASLLSTTAVLDFSKATLYDKDNVLTVVTDYTGHDQTSTGKGAANPRGLLGVTLKGSSNGTATFKQWKIQGNAGGSANIDPVRGPLNEGGLYGERLGWHLPGFSPSGTEWSTGSPAQGLNSSGINWYVTTFDLDIDSDLDVPIGLELSAPAGTVASIQIYLNGYQYGKFIPHIGPQTRFPFPPGVINNQGKNTLALSVWAETDAGAKLDTVSLFAYNVYQTSFNFAQDFSYLQPEWTSERLQYA

SEQ ID NO: 2742 - protein, 335 aa, Aureobasidium pullulans
MRSSLSLSLSLLVGLVSAANYKLVKDFSGNNFYNQFDFFTGPDPTQGFTNYVSHDHAVEYGLIWNKSVPTWGVDSYTHLNANGANGGRTSVRMTSKDTFTHGLFIADIAHMPQSSCGVWPAFWTFGQTGNWPQSGEIDIIEFANLASQNKVSGHTMPGCSISGTSQSGRIQGSDCSSAGDGAGCAFLSPSSSSAGTGFNAIGGGVYAMEWTSQHINVWFFPRNNIPSSIKNGKPDVSKFGQPMANFRGCDLDSYFYNHAIVFDTTFCGTWAGETFFNDGCSASSCVDFVANNPSAFKDAFWAVNYLKVYQQGGASKAKRDLIRRHAKQTHGHGLI

SEQ ID NO: 2743 - protein, 385 aa, Aureobasidium pullulans
MSFLLRPVLFLLSLLPILASASPRHFSTLKPAYFLLAGDSTTATQSANGGGWGDGFLNHTLRQGSSGHNYGHNGATTKSFREGGDWAKVIEEVKTKIGNYTVYVTIQFGHNDQKVTSGVNVTEYGSNLERFGREVQEVGGIALEDDSSMPEDKSKSGDDNNSPEADDNNSESGDDNKSESGDDNKSDARDGKSEHENDDSFEPEDVPEKICALFRQLNPEHIINSIKEVVLGDIEHLVNMADGRELDASTIIMLFDEAMKTRTGKATIIALNAAALVVCIVMIVFPLPTAAPVLGALGFTEAGPAAGSIAAACQSTFGTNAMFSTLQSAAMADYGAPVVAGVVQGAAAAGATVASFSLFEAFDEPFVCRWIAKDGVLQNFAKERS

SEQ ID NO: 2744 - protein, 624 aa, Aureobasidium pullulans
MAINSLLLSASCFAIAHAAISLTPAANAPAASGISQVLSPSYAGLGIEPSNLFSFTGKDTPNQLSINLLQHLTNYSGAPPHLRLGGNTGDHMVWDASYDAFNLGKNPNQEETGPTPADGSVFGPGYLEALERFPKGMPITFQLNMAYDEGDYLDRIDEAAAAVVDGLNNTSLYSFEIGNEPDLYLQGWQLQRNGTWNGQIYTQQWLARAESVCNNVLKPRGMDCNFFEAAQTASTISTTFTLKDMADAGISEDHNGTTYLSSWNQHDYFYFVGVSTYDITLNIMMDFDRTESQFQYWTTEIEYAHSTGIPYNLREMANVGPIGLKDVSNTFGAALWFLNFYCYGATLNISSVEMHMTDNSYSSPWQPIFINGEAANVRPSYYAMAAMAQLIGSGNGTTRLAPLATENSYVRAYAGYANDDLSSLVIINAQQVNTSATDKGSIDFQISLPDYSGQTLFLSYLSAGGADAVSNVTWNGLSFEGDSIGSVSTAQDQSGQTVALDNNGAATITVRDSEAVIAHLGARLGSLPVTVSNSTSSGSGSSGSGSGSSKTSSASTSGAASTVSTSATASSTTGGVQAAAASGSSSVASASASASGTAQSSSQMLTTDKTLLALLVALVCIFTS

SEQ ID NO: 2745 - protein, 879 aa, Aureobasidium pullulans
MARFAALLPLAYALGAFAQSVAYNDPNTGIDFMSYQDSKSGARFSVATPETLGSDFIGQIVAPTTEGWAGLDMSAQMASHILVVAWPNGDKVMSSLREATGYTTPPVYTGNATTTPIANGTFVNSTHFAYTFVCIGCITGEDDSFPNTVSGNAFGWAFSTDAPAAPSSEETALNMHTGFGAFAVIFANSSSASYDTWASWAEPVPAVTTPVAGNGTSSSNSTVGVDTGKNITSTAPIATTLNTTYDYIIAGAGPAGIIVAERLAESGAEVLLVERGDASTYASGGRAVESWNETVTQYDVPAMAYYLSTAGVTNEYCTDTADMAGCLLGGSSMINALMFVRPQERDFDDKWPTGWKWSDVSSSAESFYERNPGTISPSKDGQRYDQGAYDVLSSFFTSNGWSSVNALEEPNKKTDVFSHPPWNIQDGLRAGPVLTYLPLAKAKKNFHIQLNSTVIRAVRESSFVSGVEVELVDGSRQIINVKTGGKVVLAGGALSTPRILINSGIGPADQIKTVQSGSVAVTLPDQAEWIDLPVGKGLKDHPIITLKFNTKTSLSSLDTTAFTDPTQVNADLFAHGSGLLVQGGQRLNFWSSVNGTDGIERFVQGTCNSPSNDTIKMKIYLTHGLTSTGEIGVTSSGATEYITQPWLNTPEDKDALASFVDRLISFTKTANSTLTLDAGLTASSNVTGADLIKTFVTGSHFVGTAKMGTDDGRKGGDAVVDLDTKVYGTDNLFVVDASFHPDLPTGNTQAIVMVAAEAAAKKVLAVQVSGGSNGSVPASSATSVVASSTVAATTSSGSATSAASAVTSAPAITSAPASSATVPTTYTTNTATTSVAVPSPAYTQVPKYGKCGGNGYEGPTKCAEGSSCKYQNDWYWQCV

SEQ ID NO: 2746 - protein, 608 aa, Aureobasidium pullulans
MFINTLFLHVFVLSALGSAKHVPPGPLSPYCGLNVTYKQNSICETTPGVNSFSGYVHLPSSLLADSQNASDPYDISTFFWYFESRNKPRHAPLTIWFAGGPGAASSFSAMTENGPCYVNEYANDTVLNPYSLNENSNVLYIDQPVQAGFSYSSFQNSTYNFLALDTSVSPVTPMDAYDGDVPPENSTFKYGVWADQSRRHTASTTMDAARPVWHFLQSWFENFPEYRTSDRRVNLWGNSYGGFWVTGFTSHVLAQNALVKNGTLGGRVIPINTIGITNGCVDAFTTVQSYGDIAYNNTYNTSFITSEVYADIQNNITKSGGCYDQIHQCRAAVALSDPTGTGNNDTVNAICAGATVYCLAYAGNGAYLAASGRSAFDMAENASAPYPPFSATTYLNRPEVRDQLGVPVLFKPGSMTINNKFIYGTGDLARVDGIHALNAILASNVNLALVFGDRDTRCNWLSGETVANTIDWKGKSAYAAAGYQETQTNSTYIGGLTKQFQSLSFTRVFQAGHAVGFFQPQTVFEIFERSSVWSTDVATGKQKISSNGTYGTKGQSSAWSHFEVLPEVPEPVCDIWDVGTSCSEGQIEALVEGIAVIVDDVVVSPAYQ

SEQ ID NO: 2747 - protein, 1011 aa, Aureobasidium pullulans
MRFIDTAIPLFVGLSALAEAQDVDFGKVYSVKPQLKSASNTGSSTSSVNTASTASSIVSVLSSRHAATMVPSGSSSSSSQKSSSSAKASSSSKSSSSAKSSSASKSSAASSRQSSSSAQSSSSKLSSKSSSSVKAPTTLSTQKATSSTKQSSSSTSSKTSSSSAAATNLCPAVNNKDITDSKGKVYTIKCSSDTNVGSFTSKSATNSYTDCMTICDTTSGCVAFSYVGGDNGSGSGTCWMKNSAGSAIAAGKNYVAGFLKSATVNKGKASVSSSKKSSSSSKMATSSKKASSSSAKVSTSVKKVTSTSSKRSTSTSTKSSSTKVKRATATTCSNPNSILYNYAPNPNTPTQFLVDSTLAALSAAQWYPPAGYSTSFTGQFGGLFAPNYLGYQQLSSYNTSACAAYCNARSDCNAFNIYFERTPVFIPDDSCPSPNAAATITCALYGSSVDASTATNIGQYRKDFMVVIQGSNGYNLNPAPASVSSFQGPNALDAVAYSSGIYLAQQYFSTYDVTQCSAACTAYTAKSKSTAQSNKASTYSPCNYFNVFNLTLNGQSQMMGCYLFSTSDAQNYDTYRTAKGSDGTVYNLTNSYGYALYPQDKGLTSVTWSAAPTGTGASCASLGKAGDALIDYNTVNYTLGCGYDVQYSNDIGNQTTPDFYSCFAICDSGAYPGCSGFAYFGNTCYFKNLTGSSRTPQLDNYNVDMAWLPASYAGFGASTVAATVTFTTTTIAWTGASTTTVTSINGLQGTIIVETPGKVTAATTTTYVTTAIESGTASTIATQTIAPTGTGKTGTVQVIYPTPATTCGNKGALAGLYSNTFSNLQGTTSYPAFKPESFKTKTPYAIQTASYMGEYNYLKDTPTVYGKALTYAQASVLTLNHVFYLFAGHGTGYYSINLPQADDITLVWIGANALSGYTRANANMLQTYVQGTPTPVTLAFFLSANTYTPIRVIFGNGAEVGNFQMNMYAPDGTQILGSNAGTNTGMMNPDIVQFPCDTTLGGKFAAFGKET

SEQ ID NO: 2748 - protein, 319 aa, Aureobasidium pullulans
MVSLRTLLTGSILAIGALSSHVHKRDVNPGPVKGDTFIHDPTVVKKPDGTYLAAFTANGVGLKTSIDRTTWKDVGAAFPNGASWTTTYTKGDKNLWAPDLSYHNGQYYMYYSASSFGTSRSGIFLAVSKTGASGSWTNYGLVVESFDNSNYNAIDPNLYVASDGKWWLSFGSFWGGLKLIELSPSTGKPINQKSIASIAARPNNGGAIEAPFITKHGNYFYLWAAFDSCCKGTASTYRTMVGRSSKITGPYVDKSGKSMMEGGGTQILASHGNIHGPGHPAVFTDNDADVLVYHYYNAAGTAQLGINLIRYDNGWPTAY

SEQ ID NO: 2749 - protein, 854 aa, Aureobasidium pullulans
MRFSNAAVVSTILFLSVCAAELECASRTPTASQATLPLHLGPTYPTSSSLATSAEPHTVHTQCEVVPLGWGRDDAPQILKAVELCGNGGTITLPAPYTYTISSRLYMRLTRATLNVHGLLSFTPDLGYWIENSHRVEFQNMSTAWIIEGNDFIVDGGGWQQGGINGNGQAWYGRAAGQSNQYGRPISLSIYNSANVSINNFAFYQPQFWSVWAQDSRNITMTNIYINGINTDPAGNSSNYAINVDGIDTMRVDQMRLENWTFHGGDDCFAPKGNSTNMVLRNFTCIGGGIAFGSVGQYPGHPDFIINVSVSDIRVSQKIDAKYGGAAVAAGAYFKSWVGVEMGNPPQGGGGGTGRVSNVTFHNLIVENTTQAVYINKCYFKVPAQGAYCNTSTFEFQDFDFNNVSGTVRTPIGVNLNCSQAAPCRELKFSELNLRQSKTNKTAIAVFENAQNPSGSGDRLVRTKTLMYTWLHGITKSSTEIGLLGRGSVEFAVLQTIAHRGLFHDVNDHNALAENSVNAMYRAEALGLPGVEFDLRLSSDNQVLVFHDMISNRATSNDNYGGRLDAVDVSLNLQPLVAPILVKSRPANSWIGTGLKAFGRNGQIVPADGAQKLETLDSMLSHFKNLNNPNFWLILDIQDPVIFSRAAAAVNAHGLSRTVFLKFFATKAINSKGIKYNGANTCYQYARKNHLSDLQIIPQINDGELHFEGETAYLNVFNTKLSVREYLQCWADAQKAHSGNGAALMPIVSASVPANNEVAFNTARDTLAWAKSAGRKTMSILPNPDAGRIINTQCTLWTYQSGSVKAARFDESARKTKLAFVEIAKPDYVVLDLMGDLGNRRWIGDFSSYIIYLC

SEQ ID NO: 2750 - protein, 341 aa, Aureobasidium pullulans
MHFLTSIARLSAIAAITVSGVTAAPASTSLQPRADDYVGYLVSTFSDVTPAVQFHLSKGNDAGSYTFLNKGQPVLKSTVGTKGVRDVFLAHDSARTNYYMIATDLDINAAGFSWDAATRTGSRGIVVWSSKDLINWSASSLRTVESANAGMTWAPSAVWDDATSQFYVFWSSRLYADSDPKHTGVASLDRIRYTTTKDFVTFAPAKDYLALANTPLIDQEFQYLGKTGSFARFLKNETVNQVYVETTTGGLFGKWTRTPGYVRPESPREGPASFVDNVTPGLYHLLLDDYTQYVPYQSTDPAKSGAWTASNYPNFPKGLKHGSVTPLTQKEYNAVAAKYPA

SEQ ID NO: 2751 - protein, 687 aa, Aureobasidium pullulans
MRVTQVIATLAPIGLVAAGPLHNHHRHTHLHHLHHRSVNGTSSNYTTSDTANSTIFADHITYETSTVNVAANFADGTDASSASSEAASSTISESSSILSTTAQSETASSTLSLSSGASYVSGSPSNASSALIISSSIPSEASVSIVLAVAATTPTAVGALSQTVDTTTSISVDTIYNTITVNGAVTTASASEKTVTVTDVVTNFVTATFSALAPFKAPAIKVAAISSGSSCAAIKTSIVYLPASVSPTLVAGGAASSKVSSIASKATSQSSISASSLKISTATSVKKVTSSTSSVKKVTSSTKPATLITLSSLVQKGATTKTIISTSSIAAYVPSSSAKVSSKSAVSSAASSAKASASSCAAVAAPASTQTGIVSGCTKWYTAKSGDYCYAIASANGISTDTFMSWNPAVNAPSCDSIWVGYAYCVAAGCSSSSSNTPSSAAKSSAQASTAKTSTVATAAAPSTKTSTSAATSTVVASSSYKMYSGNGTVAAGWPAQNQWIDFDTMFTANIPIMKQSCGNNGWGANDSDDEIAAIKAAIKKVSASSGVDARFILAIVMQESNGCVRVVTTSWSVQNPGLMQDHAGTGTCNSGGVIQDPCPSSEIEQMIVDGTTGTTSGDGLVQCLSQAAASDVSQYYRAARIYNGGYSGFRADDLGTGCCTLCYASDVANRLTGWSSGVSGCHLGTA

SEQ ID NO: 2752 - protein, 377 aa, Aureobasidium pullulans
MRSLAFQSLSLSGLAAVAAAAPASNIARAADACHVTSYSGVAAAVSSCTNITLDGIAVPGNTTLDLTKLKAGTTVTFAGKTTFAYADANYDMIKFAGTNVVLTAQKGAIIDGNGQAWWDGLGSNGGVAKPNHFITVKAIGNSVIKDLVIQNYPVHCFSISGSNGLVVKNILLDNSAGDAPNNRSNGLAASHNSDGFDISSTDGMVLKDSRVVNQDDCVAITSGNNITVSNMYCDGGHGLSIGSVGGKSNNNVTNILFENSKVLNSQNGARIKSNSGTTGYIANIEYRNIQVSNIDIYGIDIQQDYLNGGPTGSPTNGVVIKNITMSNISGTAQAKARDYYILCGDGSCSDFKFNNIHITGGTNNSCNIKPTGNFQCI

SEQ ID NO: 2753 - protein, 378 aa, Aureobasidium pullulans
MKSFTLFTSALAAFASTVSAAGVTGAAEGFAKGVTGGGSAAPVYPSTTAELVSYLGDSSPRVIILTKTFDFRNTEGTTSAKGCSPWGTGSLCQQAIDKDNWCENYESSSPKVSSLTYDKAGMIGITVNSNKSLVGQGSKGIIKGKGLRMANGVKNIIIQNLAITDINPHYVWGGDAITLAGTDMIWIDHVTTQRIARQHIVLGESASGRVTISNCDIDGASSWSATCDGRHYWALYFTGSSDLITLKGNYIHHTSGRSPKVQGNTLLHAVNNYWYDIDSKGHAFELGQGGYVLAEGNKFQNVNTIIEAGATGKYFTVPSSGSACSSVLGRSCVNNAFGSSGLFSSADTSFLSNFKGKNIASAAAASTVSTANVGYGKI

SEQ ID NO: 2754 - protein, 899 aa, Aureobasidium pullulans
MLVRRIAAIAATLLPKVFAQNIISLSGHDWILSNSDLNISCPASLPSQAHLDLHACQVIGSPYYGLNDFNLRFVAWANWTYTSAPISNLQANSSSTWLVFNGLDTFTSISFCGEHVAATNNQFRQYYFDVSAILDDCQDEPVLSVNFGSAPKITQEIADEPGQETWPYGIEIMYEFPNRQFMRKEQNDFGWDWGPAFAPAGPWQPAWIVQLNNPEVYIRNSLVDIYRQGQLNNLPPDQSQPWVVNASLDYFGAIPNGASLRYTISTPDNTTVSSGSLSNINITQSTVTGSTVVDSSLFELWWPSGLGPQTLYNMTITLEDSRNNTLASVNKRTGFRTIVLNENPISQAQLDQGIAPGNNWHFEINGHEFYAKGSNFIPPDPFWPTVTEDRMRTLFEAVVEGNQNMLRIWSSGAYLPSFIYDLGDEYGILLWSEFEFGDALNELENLELANVNNTAPEEYDRYVSEYEKLFLDTLLPVVFGNSRSISYAPSSTSNGWLELNFSNPIPIVERYNNLTEGSVYGETDHYNYDPTVAFNLSSYPIGRFSNEFGYHSMPSLQSWQQVIPESQLYFNSSYVQLRNRHYPPGGLNTTNYYNSSLGMGEMTRAAIEWYPVPNKIDSVANFSAWCHTTQIFQADFYRSQIEFYRRGSGLPERQLGSLYWQLEDQWTAPTWAGIEYDRELGAGRWKVLHYIAKDAYQPVIIAPYYNVTTGDLEVYVTSDLWQAVSGTASFSWYDWSGNRLNISAAPSAQVNVGAINSTRVLSTNTFDILNSTGFNYSDVLLHMETTVQGMMPNSNQSKTFTHENWFHASPLSTAAMVDPGLELSYLNSTKNFSITATSGVAAWVWIDYPAGAVVTFDSNGFWLLPNQTREVGYKVKADSTEGGWIQGVSVESLYNNTIA

SEQ ID NO: 2755 - protein, 572 aa, Aureobasidium pullulans
MFGGKIMLSSAAALLSATGVSALVPVLDKRQYFPANATGLKTITTPGSNVTIRYKEPGKEGVCETTPGVNSYSGYIDLAPDMHTFFWFFESRRDPANDPITLWLNGGPGSDSLIGLFQELGPCNVTANLTTQVNPYSWSEVSNMLFLSQPFGVGFSYSEEEQGSFNPVTGSFQNATEANATGTYPAINATEIDTTDLAAIAAWHVLQGFLGALPQLDAEIGSNKEFNLWTESYGGHYGPSFFNYFNDQNKLISNGTIPGVKLDFNTLGIGNGIIDEYIQAPHYPEFAVNNSYGIKSVNDTVYNYMKFALNMPGGCLDLVDSCRQSRETGQENLATQTICSEAQDMCRDNVEGPYYSFSGRGTYDIRHPRNDPTPPEYFADYLNIAEVQNALGVSVNYTESNNDIYYAFQATGDFVYNNFLTDLEELLAQGLRISLFYGDADYICNWFGGEAISLAMNYTHSKEFAAAGYEPFTVDGTEYGEVRQYGNFSFLRIYDAGHEVPYYQPQAALALFNRTLNHWNIADGTEMVTANLTSYGSPNATHTQSFVPLPPTSTASASATDGADIVPIGWRS

SEQ ID NO: 2756 - protein, 711 aa, Aureobasidium pullulans
MSRLLSLSFFVLGALAQGTSPSYDYIIAGAGPAGIIVAERLAEAGVSVLLLERGNASTYASGGRSLVPWNNTLTQYDVPGVRHYIKNSFADKSEYCTDTPGNAGCILGGGTMVNQLAYIPPQNVDFDDKWPVGWKWTDVASAAERVHSLNPGSTNPSADGVHYDQTSYNAFANFFSAQGYTSVDAISEPNSKHDVYSHAPYNVKNGLVAGPVMTYLPMAQAMSNFKLQLHTKVIRAVRNGSTVTGVEVEVDGQRQIISLNNGGRVILASGVFSTPRILFNSGIGPNEQLQIVAGSKATTNVTLPASSDWINLPVGQGIKDHIIVTLNFNTTESVDFLDTSYFIKPSSNITDPYSHGNGILTQGYQRFTFWTSNTTSDGSVRYFQGTCYASGQNYVSMKLYLTHGLTSSGALGITASGNTVYTVDPYLNTAEDKYAIASFIDNLLVQTRKADSTLIYSGPSTDTGASLSKVYTGGSHWVATAKMGTDDGRVNNGTSVVDLNLKVYGTDNLFVVDASMHPDLPTGNLQATVQVAAEAAAVKILALPKQQSLSSSSSSSSSATSSISTSSSSTSQLSSVSTTSSTSTQLSSSASSTLVTLTTSASTSSTSSSTSSTSSTNTAQPTNPTCPKSDGTTFTAKSGAVFLVECYVDRVGHDIAYVDVPTNRIADCVNKCDALPGCVDISMSGTACYMKGAVGEKIVNSKYIRGARRIS

SEQ ID NO: 2757 - protein, 447 aa, Aureobasidium pullulans
MIRSLTTFALATAASALSLSSNGVQNGCMFSVPDVGDFNTQILHDWSSSSTSDDVFKDLQASTYTVDAGTAPFARRFDIVNIGQDTKDPSITLTVPGGQQHGPVSSAQITTGFADILYGSVRTVAKVSNVPGTTHGFSFYANDTQEVDLAFLTSDISVIHLTNEQLTPDSELSSYQVDAPSDAATAWHEYRVDWLPGVTNFYIDSELVHSIDKNVPTTPSFFLWNSWSNGNSWAAGPPASNSVLKIQSVTAYFNRTSVASSIAANPGACVSNPFSILSAYYADKNVTTSAQSAFINGSNLYIDTSSLDTQLGGNPWSGTAKTLTFLYTYGTETRVFVAAQNSGTYLITPGGIDTAPGSVLVPSITAPAKATIDIISVVWGKSQISTASVWNALYNDSIKKYSFQLLDEFFGIDTWWGTQKTAVIWYTAADGSFKAVVGRENAWVKFT

SEQ ID NO: 2758 - protein, 830 aa, Aureobasidium pullulans
MLRSSAFHPRIKPRAACRRLLHQASPTFKDTRKGTAGVAAAVLVVTGAYTLGCPRQVLYADSPEGPDSQGWFSWPVVVKAVTPDPKELPTVSKAEGYDNANQSRPGQQAPPSQTKGHKNSDISEALNDSDVSAWHGMIESFETAKDSIVNFEISKIGEKIAGTIVPRWVKVMPGYISKLQNELSMAPGSLAEEIWHEANDPEINPEIIWDARVRVSDDICKEERDFLRKRKIHTTAALAKYLDVPETEIHPADVPTIAMCGSGGGLRALVAGTSSYLSAQEAGLFDCVTYTAGVSGSCWLQTLFYSSVGQQSHGRMINHLKSRLNVHIAYPPAALSLLSSAPTSKYLLSGVVEKMKGVPDADFGLVDVYGLLLGTRLLVPKGELGISDNDFKISNQRQHTDSGAYPLPIYTAVRHEIPNVAQTQDRAMNLQDETSKAIARAEAWFQWFEWTPYEFFCEELGAGIPTWAIGRKFDGGYSVYRDNGLALPELRVPLLMGIWGSAFCATLSHYYKEVRPIIRSLAGFSGIDQLIAEKDEDLTKVHPFEPASIPNFAANMKSLLPQSCPESVHNVSTLQLMDAGMSNNLPIYPLLRPGRDIDVLIAFDASADVRQDNWIKVTDGYVKQRGIKGWPMGAGWPTEELNEEQTLKELEQAQATTEEEATKRVEEAQNAEKSKPVVEGGKVPAKPSDLGYCTVWVGTTEERENDTEPPLSKQVEEDWELMRPDAGIAVIYFPFLKNKKVPGVDPQTSDFMSTWNFVYTDEEIDKVVSLARANFEEGREQTKRTIRAVWERKRKHRLDREAEAKEIRRQTRMRKVNRYKQYGDHGDQFS

SEQ ID NO: 2759 - protein, 787 aa, Aureobasidium pullulans
MMISTCIACTILSGLCLLPAVYAKALWATEPANNFTDIIRTAYPVGNGQLAALPFGNPGHEKLSLNVDSLWSGGPFENSSYNGGNPRSSVASALPGIRDWIFKNGTGNVTALMGDDNNYGSYAVLGNLTISIDKISNFTAYNRSLDLTTGVYTTNFEADGSKYTSKIYCSYPDSVCVYEVSSTGTLPIIHISFENQQSNASLVNSICSTSSRTASFVGITQAEIGMLYRAEARVVGKSASLSCSSGILTIKPSSQQHSLALVVAAGTNYAETKGTAAANYSFKGSDPGDYIATIAALAAAKGARALLQTHVADYSALSSRFTLSLPDTAGSAGKPTAELIASYQGTENITSDPYYESLQFDYGRHLFISSSRQNSLPPNLQGKWAYGLQNAWGADYHANINLQMNHWGVDQTGLGDLQESLWRYMVQTWIPRGTETAKLLYDAPGWVTHDEMNIFGHTGMKTGDEYWANYPASAAWMMLHVSDHFDYSQDLKWLRETGYPLLEGVSAFWLSQLQEDVSFKDGSLVVNPCSSPEHGPTTFGCTHYQQLLHSLFTNTISAAKALHISSPLLPDLTHALHHLDTGLHINPSLQTLQEWKLTDLDNTYNTNSTHRHLSHLIGWFPGSSISGLLSGYTNTTISTFVRNTLIQRGPGITDSNAGWEKVWRSACWARLNDSSSAYDELKLTISQNIASNGLSMYSGKNEPFQIDANFGFVGAVLGMLVVDIQGLEEVVLGPAVPREWAGGSVRGLRIRGGGSCDFGWDERGVVQGAKCKGVRRRVVNVEGKVLC

SEQ ID NO: 2760 - protein, 339 aa, Aureobasidium pullulans
MKNINIVALGAALLSAVMGSTACGNAGTTTLRQTAAQKDILIGSGAINPTYLDDARFATILSQQFKSLSPENELKWNFFHPNQHYYNWTALDCLVGFAEANDMVVKGHGLISNCCNPDYLLNITEPARFRAAMVDHFNAVMHRYKGKMDRWDVVTEAVQTMGGGLSNNTFLRVLGPGYIADAFRIARAADADAKLFINEGLVESLPGKRQELYTLVAGLVGAKVPIDGVALQMHITDVAPTPGVITNITNSYTALGLEVTIAEMDVHTLNKTLETEIYEAVIREALDAGITDISFWGFTDKHAYTWLPGAKPLMFNEEYSAKGAYYATHAALTDFVMNN

SEQ ID NO: 2761 - protein, 898 aa, Aureobasidium pullulans
MFFFTICGLLLPAFIYQVNASPHNAQPKHRLGRERINLNSDWKFRRWEENPDGLIYDYRQDLENLTDVSILKPWILPSGNDFIKDSSKHYQRPEGNPGSNVSFVQNDFDDQCWTSVTLPHDWAIAGPFYTEPDGEAIVGGGMGRLPVFGVGWYRRKLHISNDDKNKQIQLELGGAMSYAMVWLNGKLIGGWPYPYNSFQLDLTPHLQFGQDNQIAIRLDNPVDSARWYPGGGLYRDVWLTKTEHTHVNQWGTRFTTRDVSNDSAVIDLQLSLGNTANYTSKVSVVTEIYRSNTVTGQQGRMAAAFPATTVEIEAGDKISINQTLLLSSPQLWGPPPTQTPNTYIGVTRLLNEAGSQVDAYETRFGIRKFEYTGDDGLRVNGERVRVQGVNEHHDLGALGAAFNVRAAERKLEILRELGVNAIRMAHNPPASELLDLTDKMGFLVFDEVFDSWERNKTANDFHLIFSDWHEQDLRAMIRRDANHPSIMVWSIGNEVGEQNYTQELTEIATTLYAIAHDEDPTRPVTASMNFAQPGNNGAPFPDILDVLSINYQGEGIRDTPNYAVTKGITTKPAYPLFHGDQPDKLIWTSESASTVSTRGTYFFPVTDDGGAPVNDSSGGNTTLAQVSAYELYSANFGSSPDKVFATQDQNPYVGGEFVWTGFDYIGEPTPYYTSRSSYSGIIDLAGFKKDRFYLYQARWRPDLPMVHILPHWNWAGREGQVTPVHVFTSGDEAELFLNNVSMGRQHLDQYEYRLRWDKITYEPSELHVVSYKAGKFWAEATVRTTGPAVSLRLTADRQSISADGVDLSYITADVLDSQGSVVPTANPEIEFSVSGSGEIIATDNGDPADLVAFPSTNRKAFSGKALAIVKALKRNETISVVAKSEGLTAGEITLSLLT

SEQ ID NO: 2762 - protein, 519 aa, Aureobasidium pullulans
MKTSVMTATLGAVHATNALLTIRNNDCASFTHNLTLAENTKILNTTYHAPHTVNITSGQQNIYNSHGFCEVDATVSYGRNSTLHFSVYLPDALPYNGRLMAVGNGGMAGVLDKTALMQQLNSGFASAAGDAGHLASLNNDGSGAPDTYIPYLHNPEEVQAWIHDAIALFVPSSKDLIEAYYNKPAAYSYYSGCSTGGAQGFALAQYHPELFDGIIAGCPGNWYSHLALSFLWNAQHAVENTSAYLPQTALNFTGQAVLEACDAQDGVKDGVIENPLECNFSIDSLACNATQISRNNNTITCLTPDQIAVAKAIYDGPRNPETGERIYPGFAHGSEIQWILQEGSLSHDFSVPILQNLVYGNLSYNASTFDWTSDVSDVDTNAGAFIDAVSTNLTAFRDRGGKLLVYQGWADPFNAQTWPIQHYEDVQSFFEDDISDFYNVFMIPGGGHCGAASFYPQVPATYHTVPALMDWVERGEKPEEVLTTNPTNGETRSRKLCAWPKAAIYVQGNTDDWKSYVCE

SEQ ID NO: 2763 - protein, 227 aa, Aureobasidium pullulans
MHFTNSILAGASILGLAAASPIELDTRQSGCSSYTIINTRGTGEAQGPSAGFRTMNSNILSSKSGGKVYNTVYAADYSQNSAAGTADIVNKITTTLRTSPNECFILEGYSQGAAATVNALPKLTGTANTAVKGVWLIGDPLHKAGLTCNIDSTGGTTTLNVNGISQYPGSNSIPSGWISRTQDVCKYGDGVCDTTHGQGINAQHLSYPNDATVQSMGAKFVLGKLNA

SEQ ID NO: 2764 - protein, 442 aa, Aureobasidium pullulans
MTPAKLLSLFATIAAIAQTLQCPQNVHGQASQMMASNIARSQGAAASSSGTGLIELGIFYQALRESIAATNNTADKQAWTAYLHNSTATAIPLFTNATSAIGLPLDRFSIGTEMMRQSHETQSASLLSAISTLQDSLAHQPRNTNGGLWYYDNQNNLTAYRNLSYTDGMYSYPTFAILSAGNGTRQSDAVGPAAVLKQLEILAAICDDGTGLLVHGYDALKAHDWADPETGASPSVWGRSQAWYTLGVLEALEALQSATSPAMTLEVKIAYSNMKLLLNSLIKAQIVALERALQINGKYCVWQVVDLPGASINGSQNFIETSASLMTAYSLLKSVRLNILEDTKLRTKAIEAGVGLWENIFETHITRNANGTLDLSGTSSIASLSPQIVNAKARYELNFPILPIGNVDSFSQYYFDRPTANNSLIGTSAFILASLELEKLCG

SEQ ID NO: 2765 - protein, 480 aa, Aureobasidium pullulans
MRSLAILAPLCGLGLAAPAAEITPTPVPTNVNNGLLGGVVSDLSNVLAGVGNGDIAGQDAWSSISYAVQSVTATTTPVAAASAIESLASIYSARPSANAFEYAASLVAEGLTSSDMSSVLGSIDGNGTADVNKRSLLDLDLTANSMNNKNPKNPSRSVYPQKACGDAPYTVDEATLRAAIHIPSGFTYGAKPPVILMPGTGNTGFETFQGNFIPALKGQSYADAVWLNVPGSLLDDSQTNSEYIAYAINYISGIASRNVSVIAWSQGNINTQWAFKYWPSARQVTTTHIAISPDYAGTTMVPLICPEGLPCPLSVLQQRYLGASDFITTLRSNDGDSAYVPTTTLYSSNFDLIVQPQQGTGASAYILDARNVGVTNNEVQTVCAGTVAGGFWTHESMLINSLTFALAKDALINGGPGRVSRIDLETVCNQPLTPGLGLAELLLTENSLLIGLAKIITTPLKATTEPATRAYVNVMPACDA

SEQ ID NO: 2766 - protein, 328 aa, Aureobasidium pullulans
MKFSIAQAGLVSATMLLGSVSAQTCDLPAKPQWSSTTALAQPKSGWVAIKDFTTTFFNGKHLVYASYHDNSNYGAMNFGLFSDWSQMASAPQNAMSSSAVAPTLFHFAPKNVWILAHQWGPTTFSYRTSQDPSNANGWSAPQPLFSGKITGSSTGAIDQTVIGDSKNMYLFFAGDNGKIYRSQMAIGSFPGNFGTASTVVMSDTTNNLFEAVQVYTLKGQNKYLMIVEAQGSGGRYFRSFTSTNLGGSWTPHATSESAPFAGKANSGATWTNDISHGDLVRTNADQTFTIDPCNLQFLYQGRDAKSTATYDKLPYRPGLLTLKNPVKK

SEQ ID NO: 2767 - protein, 581 aa, Aureobasidium pullulans
MWLASIITLVLSTGLGVKTHAVANTKNATYTNPILPGFFPDPSCIFVPELNNTFICASSSFLAFPGIPLHASKDLIHWKLVSHVFNRREQYPSFGNISNNQFGVYAPTIRFHENLFYVSVTMFGSSEYPYLTNLVFNASDPFDDHSWGIPISTQGQAYDTSLFWADDGTIYDQGAAGLGIVQWKVDLQSGNITDQRYIWNGTGGVAPEGPHVYKKDGYYYLIIAEGGSGDAEGTAATKHHESIARSRNVIGPYESNPANPILSNVNTTQYFTGTGHVDLFKDARGNWWGVALATRGGPKSAAYPMGRETVLFPVSWETGEWPVFDQVRGIMSGPLPPTDLDIHAHGRFIGGPDIVEFSPGFDIPIHFTYWRFPISGAYTVSPAKHPYTLRLVPSELNLTGSPNHALSDGQTFISRRQTDTLFIYSVDISFLAASENEEVGVSVFLTQDQHLDLGLTKLNNVTYLRFRGRSSKEIPPAEILHRVDSTWLSEKVRFQIDAFNATHYRFLAGKVEEDVDRVPLREIAVAPASLVSGGYTGTLVGVYATTNGGNGSTPAYVSRWRYLPRGQAVDYDTWVYADEHC

SEQ ID NO: 2768 - protein, 314 aa, Aureobasidium pullulans
MRTQFLFGAALAVTAAASPVIKNREVTTVTVSGSTATSYPQPVSEIQGFPIHQSCNGTERRQLEKALGDTIKIAQQATQHIHAHGNDSALYTKYFGQAPTAEVIGWYEKLIHGDHEGVLFRCDDIDGNCHQEGWGGHWRGENATDETVICPLSYSTRQPLETLCSGGYTVASGKLNHYFAADLMHRLFHTTKIGEGAAEHYADSYTECLELAEENPAEAVRNTHTLQYFALDVYAMDVALPGEGCTGTVGEEEVGSHAAATASSAASSAVSSASASTTAAATSTSAQAASQTASKTSSAAVECHTHADGVVHCV

SEQ ID NO: 2769 - protein, 367 aa, Aureobasidium pullulans
MPTFSLPALLALSSVASAWPHFGPPNPPLHPLPKSSAWNLKKFTSLVAFGDSYTDDSRLGYFGSHNGSAPPVGWISPANYHSADGGRPWPQYVAQYSGANIYNYAVSGAVCSNNITPRTFSSINALFPDIDGYELPAYLADSKYVYPNGTKALNVPVDSTVYSIFIGTNDLGNYAFIDDSQVANKTIPDYIDCVYTQFSRLYASGARYFVLQNVSPLQLSPQYGLPSKGGLNATQYWPEKPANTTEVSGRMLETVTTVNDVFKYRTPFEILVNKKFPGAHFALMDMYGLITDMYNNPSQYLNSTNPTVTGYVNHCTTAGTNCVAASNPDSYLWYDPLHPSEQADRGFAKAFIDVVNGNSKWATYYSG

SEQ ID NO: 2770 - protein, 230 aa, Aureobasidium pullulans
MSTQAPAPTAPQQPLSDPNTIQIPEWDSNAVHTSKDGVATTSQPGAHHGGNAVLQEKFNAVLPRSRSYFGLKRRTFLIVVACAFLALLALIIGLAVGLTKHSKGGQNLPLPTNSEQHEGDLTYYGTGLGSCGLTSTDSDMIVAVSHYVFDAASRSSDPNQNPLCGLKLRASRYDEQVGERRSVDLKVVDRCVGCAATDIDVSPAAFDKLAARASGRVDVTWAWLSPQATA

SEQ ID NO: 2771 - protein, 440 aa, Aureobasidium pullulans
MMSIRSLLSFGLLAAPLVSALPAADYKSTSCSTSTSHSTSHSTSHSTSHSSTHTSTHTSTSTHTSAHSSSATSAVVTTTTSSASNTVQTTTLVATATGKKGLDTYAKKAGKLYFGTAADVPGTNETTDKYYRAELANNADWGSVTPANAMKWVFTEPEQGVFNYTEAELFLAAANPNGKRKVRCHNLNWYNQLPNWVTSGTWTNETLTAVLINHVTHLVEYFGDRCYAWDVVNEALSDSGTGNLADNSTWRSDIWYNTIGPNYVAVAFKAAEAAVKANKLKVKLYYNDYNIESAGNKATAAQALVKSLKDAGIQIDGAGLQSHFIVGSTPSRAAQTANMNAFAALGVDVAITELDIRTTVPATAAAQQQQVVDYASSVGACADVDACVGVTAWDFDDAYSWIPSTFPGQGYGDLFFQPGGYGTPLVRKAAYDGCIQGLTS

SEQ ID NO: 2772 - protein, 446 aa, Aureobasidium pullulans
MRSFSTLLAFAVALPALVAGELSGKVGPTTSHATKAAKKTCDITKYGAVADGKTDISTALNSAFTACKAGGVVVIPSGNFAMSKWVKLANGNNWALQLDGIITRTGTDAGNMIMIEHSDNFEMFSSTGKGAIQGNGYQIHKTGSTSGPRLLRVWDITNWSVHDITLVDSPSFHFSIDTCTNGEVYNMAIRGGNEGGLDGIDVWSNNIWIHDVMVTNKDECVTVKSPSKNILVENVYCNWSGGCGMGSFGTDTAVSDITYKNIYTWSSNQMFMLKSNGGSGTVSNVVLENFIGHGNAYSLTLDEAWSSMKTIAGNGVQLSNFKISNWTGTELKGTARGPIKVACAANAPCHDISITDFAMWTEQGSSQFYSCENAYGSGFCLKSGTSYKSYAATTQWVSSAPTGYAAPTMAADLKTAFGTTQSIPIPTMPASFFPGVQPYTKLAGSK

SEQ ID NO: 2773 - protein, 293 aa, Aureobasidium pullulans
MLKTFASAAALCTVATAYSPFLVNSLSTHQPIGNNEGQTNYYRIAFDVSSSNGGANSSATCQTFWGDNSWTEPEAYSVAVPTGKWIDCDSSDFRFKLFPYFSIGNFSLAIQQNFTDIAIKEEIIANGTTHISNSTSWFNCKINPIEVMYLQHAQGDCNMASNASAYSIPVESAEACTSGKATTIFEVSGSFENAGESILLIGSIPELGGWDTSKAIALSNLDAESAGAPSFGGRFDIAEGTTFEYKYIMQEADGSRSWECCENREFTVPADSACSEQSVDVGWFRGGGTAVYK

SEQ ID NO: 2774 - protein, 596 aa, Aureobasidium pullulans
MKSISSKRSLFAALACVPSVVAAQYGNATASANASTISFHDPTGVSTTFATKSFNYSLASTYSVQTDFSNERLAALWQQVGPIAAGPVTTTVSPTPESSPLARPGVMHPYIPSYEANLSNAKLPENFIWGVASSAYQIEGAANAEGKGPSIWDLLAHRVPNQVADNTTGDVVAEHYYLYKQDFARLKTLGVPVFSPSISWPRIFPFGKGPINEEGVHHYDDVVAELVKNGIKPAITLFHWDTPLALFNEYGAWTDPQIVDDFFNFATFIIQRYDQYVETWFTINEPQYCNWQYASYPAGKYYPAYNNVTGGLEARFLCGHYTLLAHARVAKWYHEDFKGRGRITFKNSANYFEPNTTSSADAVAVQRNYDFVLGWFNDPVWKDGDYPESLRQTLGDTLPTFTDEEKALVKGSCDFFALDGYTSFYASGIDDLEACTSNSSYPGYPECAGSQSTAPDGFPIGPSADGGANWLYSAPVGLRRFLKKITTELFPSVPDIMVTEFGFAEPGEAALSSLNTILWDLRRADYYQSYLDNILASIHYDGVNVTGAFGWAIFDNFEWGSGLNTRFGLQYVNYTSLERTPKASMFTFLNWFSQHI

SEQ ID NO: 2775 - protein, 345 aa, Aureobasidium pullulans
MRSFATIMAAAALAQTAMAHYRFNKLIVGDEVTKEYEYVRQNSNMNSPVTDVTSKDLVCNVGGLDTGAQTSTYKVAPGDTVGFAVDTPIQHPGPLNVYMSKATGDASEYDGSGDWFKIYEMGANKAGDNGLTFKADKLDKVTFTLPDETPAGQYLLRVEHIGLHSASSFGGAQFYISCAQIEVSGSSTAKPDPTVKIPGVYTGHEDSIELSIYYPIPVNYQPPGPAVWGNGAAADGNATDSASTVAASSATAIATSAVSATTSISTQQAVATSAPYPTENATSVAAGPTGFSTVVVSSTAPMGTGTVGGAVKKYMQCGGKAFSGSTECESGTTCKSWNEYYSQCV

SEQ ID NO: 2776 - protein, 291 aa, Aureobasidium pullulans
MVALKNTALNMMAIGAMAAVANADQSLEKRYTSSSSGSLVKGGCYYSVPNVGLFTTRMTYSWDNAFTLAATGVGVVQDLVSSLYTVGAGNSPLPRRFDLVNIGVSLLDPSITLTVPGGQTKGPISSAQITTAYDDILYGSVRTVAKISSVPGTTHGFSFYANDTQEIDFAFLTTSSGVAHLTNEQVSADSPATSYQVSAPSDATSAYHEYRVDWLPGKAMFYIDSKLVQTITGNVPTSPGFWLWNNWSNGNAWAQGPPAKDNVLKIRSIDGYFNRTSVLQTYAATPFGCNI

SEQ ID NO: 2777 - protein, 545 aa, Aureobasidium pullulans
MLKSFFLAAASSGLAAAITCDDLASSLTFKDVDVISASSSYYTKGSTINIEGEQSNACFKQTYPEIDMCRVVLTVATSPTSHNYMEVWLPSGSTPWNGRLLGTRNGGLAGCIEYEDMAYYSSLNFATVGDNGGHNSSTSDGSKLLNNNEAVIDLSYRSRHISVVAAKQVIKQYYSQPASYSYYVGCSTGGRQGLKSAQEFPDDFDGILAGSSASDFNHLSDWTSRFLLITGFGSDARALSKDQWVYVHEEVLAQCDEPLDGVADGILEDPTICEFNAAALQCGTSSDSRCLTQTQVQTVNDVYSELYDQNGNLLYPSLSLGAELVASQQGLFTGSVIGNAANFISNAVYNDSNWDPRSLSQETFTRADETDVLHGNISSWNGDLSAFRRAGGKLMMYHGMADPNIAGENSQRYYLHVAKTMGASDEQLDEFFRFYRISGNGHCSSGGEGAWEFGQIAAARNGKFSAVQQLVDWTEKGIAPDTITGTKFHNDDPNQGVAFERSHCRFPYRTTYKGNGLDPNVTTSWTCEKINNWQECGPGALPRLC

SEQ ID NO: 2778 - protein, 802 aa, Aureobasidium pullulans
MKTSLAVLGAATLCAASVSNTTKDGLITNGLVSLGDWQSAFDKAQNFVSQLTTEEKITIIGAGSLTNTSANWTALGISDGPQGAQNFYYESAFSMTCALAMTWDKDAIYKQGKAVATEFYQKGLQMLAGPVSNPMGRSAWGGRNGESFGPDAYFNGILGGISAKAYQAGGVIAGGKHFILYEQETNRTSSMSGGGGMGGGMGGGPTGSGNSTMGASTSGSAPSGSAPSGMTLKARADNSSTTQSSTESAPYSSNIDDKTFRETYLWPWYDIIKAGTGAVMCAMTEVNNTAACEDSSLLMGMLKTDLGFPGMVWPDQNGQKTALGSATGGLDYGSSSTWSTSTIEAFLSNGSLSEARLNDMVIRNVIGYYRANLDNGEQPSKADYDDYVDTMSDHANIIRENGAKSIVLLKNDGALPLNKPRRMTLFGANAGPVMGGPNLQFTVQGSGPTYQGHLASDSGSAQSSLPYLITPEAALTLRASKEHTNVKWILNDTYSTSSSGNTLVTLSSSETAVDASYAGYAAASDVCLVFINALSGEGADRTELYNKDQDTMVNTVAANCNNTIVFITSTGIRLVDQWIENENVTAVLYSGPLGQESGNSITDVLYGDVNPSGRLIHTIAKNESDYNVEICYTYNCNYTEGNYIDYKYFEHSNTTARYAFGHGLSYTSFGYSDIKTTKLMSNLSYHAKGRLEVGGRADLYDVVAEVDVNVQNTGSRDGAEVPQLYIGYPEGSGADQPLKALRGFERVEIKKDEHSQVKFQLRRRDLSFWDVTAQEWALPTGDFKIYVGASSTDIRQTGTLAM

SEQ ID NO: 2779 - protein, 861 aa, Aureobasidium pullulans
MLLVVNLQALFLLWACSVITVDAQSGTVTESINPAATNVTLAQSSAPAVASTLAGTVGNGAVSQPSLLDQIDQAIVQAVADTKNALKKILAPELYYSYGRSPPVYPSPNGVGLGGWTTAYAQAKALVSRMTNTEKAIVTLGSSQNYGCSGFVGPVSRLGFSGVCLNDAESGVRGGNLVNGYPSQLSVGASWNRTLAHARGQAIGREFKAKGINAALGPVVGPLGRIAKGGRNWEGFTNDPYLAGGLVGPTIKSMQESVIAVVKHFVANEQETNRNPFLLGLIPQLGKQAVSSNLDDRTMHELYMWPFYDAIRAEPGSVMCAYNRINGSHACQNSKLMNGLLKTELGFQGFVVSDWGANHAGIASNNAGLDMVMPQSSQLTPSSLSFAVLNGSIKSSRLDDQATRIIASWYRYAQIPNIGVDSNKNIDARDPAASNVLLQSAVEGHVLVKNINNALPLRAPSTLNLFGYDAVGGLNGTSGLGSGGLANTQTFTDGRPFTSLEYISFVTAFAPDSFNAPTVALNGTLLSGGGSGSITPSSSTSPFDAFRRQAAMDNTTLHYDFVSSSPLVQEPNKPCIVFINAQSVEGSDRSALSDDYSDNLVRSVASQCSNTIVNIHNAGIRIVDSWIDHPNVTAVIFAHTPGQESGNALVEIMYGKQSPSGRLPYTVANQESDYGSLLGPSYADANNPLYPQSDFSEGLNIDYKHFINQGITPRFAFGYGLTYSTFNYSSLQVTKQAGAITSAMPPDAASRNPVPQGGLNSLYDIIATVTIQVANTGKVAAAEVGQLYVGIPGSGQPKVLRGFEKQLIQPGSSATYSFPLRRRDLSVWDTGSQQWRLPSGTFALNVGKSVLDIQLQGTLQL

SEQ ID NO: 2780 - protein, 552 aa, Aureobasidium pullulans
MYVKTTSLATLGVLATKAAALDNGFGRTPPMGFNTYNPAACTINQTFVRDSINAFADKGFGAAGYNIFGLDCGWQGTQRQSNGSITYDAGAFPDGILPLSKLANSKGFKWGMYTDQGVNACDTGVDRPGSLNHEKQDAAQLAGWNVAYMKVDNCYITAGDNAPKDPRTDFPSRYGAFSNAIQQVGIKGMLVCQWGTPYSSPGGLQGPAEWTPPLSTSFRVSDDITQGWASVSRIYNEAINVNLRGLNGPGHFSDMDLLEVGEPGMTTDEQASHFAIWAMFKSPLMVSTRISTMSSSTQAILQNKGLIAINQDSLGQPVVLTQRFTGDNDQFAGPLANGDVAVLLVDLSNTKRTLGINFSALNISSATVTDLWTGKVVSNANNYFTTVNGHGSVALRLSNVKKSTPAAPKLTYYEAEAGQFAGSAGVASCSGCSGGKKVGNVGNGNGNTLTFSGIRTSQATQDVRFDYIDCEIGYAFSGGYGNVRGASISVNGGAAQSVSFPLTGYNWDKDITKGFLVRLSGFKTSGDNTITISGLSSVSPYAPDFDRIGVVA

SEQ ID NO: 2781 - protein, 869 aa, Aureobasidium pullulans
MRLTTFTLAAVIGWTLAQSSDNAIPFPNVTYPDAISPNPNVVLGARTNQTSPPRYPSPWGTGAGEWATAYEKAIAIVEQLTLEEKVNLTTGSGWQQEQCVGQTGGVPRLGIRGQCLQDSPVGVRYTERLAYERGKAMGLESRDKGVTVQLGPDAGALGRSPTAGRNWEGFSPDPYLTGKLFADSIRGIQSTGVQASAKHYVGNEQEHFRQTPESRDYGFNITQPGSSNIDDQTLHELYVWPFADAVKAGVASVMCSYNLVNNSQACQNSYLLNHVLKSELGFQGYVMSDWQATASGVPAILAGLDMTMAGDIRFGDGLSYFGPNITIAVLNGTVPQWRLDDMVVRILASWYLVGGDTEVPTPNFQSWTPDTFGAVHAHVGSTWGTGLVNQHVDVRREHGRLIREIGGASTVLLKNTHGTLPLNNMAKLTAVFGEDAGSNPLGPNGCRNHACDVGTLAVGWGSGQASCSYLISPDAAIQHEVVSRYGSYESITNNSAFTQINALARRVRDVAGVCIVLTNAGSGEGFANVDGNYGDRKNLTLWQGADAVIANVSATCNNTVLVIHSVGAVEIDQYKDNPNITAILWAGLPGEQSGYAVADVLFGRVNPGAKLPFTMGRNRSDYGTDVLYTPNQEVPQYNFQEGVFIDYRGFDHRNVTPVYEFGFGLSYTTFEYSGLVIEKLNVAKYQPTTGFSGPAPTYGTIDNDTSAHTFPGNVTRIPLYVYPWLNSTILNESYGATGFGDDSSIPENALNGTSFEHSPSSGPNGGNLYLWDILYHVRVNVTNTGKVVGDEVAQLYVSLGGPFDPKIILRGFERVTIDPGQTVQVTFPLARRDLSNWDTVKQDWVITEHIKIVYAGSSSRNLPLNAVLK

SEQ ID NO: 2782 - protein, 574 aa, Aureobasidium pullulans
MKALSFFVAASLTRLGSAQPAKQQNSTIYNPILPGFNPDPSCVFVKEWDNTFFCATSTFLAFPGIPIHASKDLQNFRLIGHAFSRPEQLPAFGNITGQQQGWYAPTLRYHNKRFWIINSCVGAATGYWSTSDPYNNDAWTNVTPTEIPGYDPDLFWDTDGTVYSAFAKTVQNDPFTTEIHQVNISMPSGNTTTDRFLWNGTAVQPPEGPHMMLKDGYHYLLLAEGGTAQAHQVTIGRGRSAQGPFEANPANPILTAYNTSQYFQTVGHADLFQDAAGNWWGVALATRSGPEYETWPMGRETVLYPAKWEKGQWPVLGGPVKGKMSGPLPPANRNIRGTGAFIKDPDYYKFSPGSSIPSHFSYWRFPKTENYAISPKGHPNMLRLLPSRSNLTGDATALPTDGITFIGRRQTDTLFTYSVDVDFSPSSVGDESGVTLFLTQDYHADLGIVRLNKTGTYLRFHAEGPGAPTDTVLPIPQKWNKQVLTLQIQAYNTTHFSFSAGPKAGRMQQIATVPATLVSNGFTGSFVGVYATNNGNTKSNTPSYISNWVYQGQGQYIGNGEFYPSNGKKGGAGF

SEQ ID NO: 2783 - protein, 836 aa, Aureobasidium pullulans
MRILPYLALIGLAFAEDGLSGWLRYAPLPSSVSWPYIPHNIVVLNTTKTSPVYTAGQELQRGIQSILGQDCHVSSDSTHESIIVGTLDAYVNAYGNLSQTVDLKEDGFWLSTEGNTVQILGQNERGALYGAFEYLSMLAQGNFSSVAYASNPDAPIRWVNQWDNLDGSIERGFGGASIFFANGSIVDGLTRVAEYARLLASVGINAIVVNNVNANSTILTPDNINGLGRIADTMRPYGVQIGLSLYFASPTQGIKGQANLTTFDPVDPEVVAWWTNVTSQIYDVIPDMAGYLVKANSEGQPGPITYNRTLAEGANLFAKAVQPYGGIVMFRAFVYNQLNESDWKADRANAAVDFFKPLDGEFDDNVVLQIKYGPIDFQVREPASPLFANLRKTSMAVELQVSQEYLGQQTHLVYLPPLWETVLGFDMRVDNETSLVRDILAGRTFERSLGGYAAVVNVGTNQTWLGSHLSMANFYAYGKLAWDPTQDTTMIHEDWTRLTFGLDQDVIDTITQMAVESWPAYENYSGNLGIQTLTDILYTHFGPNPQSQDNNGWGQWTRTDHDTIGMDRTVSNGTGFSGTYPPQTAAMYENISTTPDDLLLWFHHVPYTQHLKSGKTVIQHFYDAHYAGAETAQTFAPRWQSLQGKIDDQRFNEQLYRLQYQAGHSIVWRDAIVDFYHNISGIADDHNRVGNHPWRIEAENMDLNGYKIYTVNPFETASNHHAVITSSNSTVGSISTTLSFPSGKYNIGVNFYDLYGGKSRFEIRVGNVTVGMWKGDSEDYLGHTPSIYLDGHSARRITFGDVDVREGDLLEIVGMPDGIEPAPVDYVVFLPEGVLD

SEQ ID NO: 2784 - protein, 482 aa, Aureobasidium pullulans
MKISSIAPVLALMAAQSVNAHTLFAELYVDGQAQGDGTCIRMPWDPNTATNPIPSLDSSDMACGVDGTKGVARVCSVDSGSTLSFEYRDWPDNPSVGSIDISHKGPCAVYLKKVSSAIDDEGTGDGWFKIWDEGYDESAGKWCTEKLIDNNGHLSVKVPEGLQGGYYLIRPELLALHNADKGDPQFYAGCAQVWLNSDGTQLPQSTVSIPGYVDYNQPATSFNIWNEKMALPYPMPGPSVYTPSSSAKVGNQKLRVSQQKQTEGLAPSNSIITNGNWNGIELAKYNDQEGCWNASTACWAQSKECYDTAPPTGHSGCKIWEGKCQDINDQCSASNYNGPPNYMKNLNPVVKQVKLPAAEAAQTGDGSYSPASSAVASKPATTFKTSALVAKATAVAPPSNSNSLTVSTEGNCGNGVTCKGSSFGDCCSSHGYCGSSDQYCSAGCNSAFGTCGGQYKRDEHNHMHVHKHKRAVRVGGDARMMP

SEQ ID NO: 2785 - protein, 809 aa, Aureobasidium pullulans
MLSASLLSIAALTVPSALAASLRDQLPGVPAGWSVSGTPDASQSITLKLAVKQQNIDQLEGLLKSVSDPSSPTYGKYYTADQVNALFAPSSGSVDAVTSWAKTASLDNSLDRGLHVTIKTTIGNANEVFGANFTTFKDESTGVEKLRTLQYSVPDEISSHVHFVSPTTFFGRTNAESALRLPENVGVERREPVSEPKSGLTKRALACVSYSARGTAYLGPDCWKQVYNVTYVPDASSGSRIGFGSFLNESAIEADLFLYEQKYGIPKQSFNVTLINGGVNHQEPEYTTIGEANLDAQNIFGLAHPLPVTEFITGGSPPFLTNLDLPTEADNSNEPYLDYYAYLLSQSNEALPQVISNSYGDDEQTVPIDYARYVCNQIGMMGLRGITILESSGDTGVGAPCQSNDGKKTPQFTPAFPGTCPYITAVGGTQGFNEEAWDGSTGGFSNYFPRAWYQESAVETYLGSYISKSVQDYYTPFTNFSARGFPDISAHSSNPYWPVYANGVLALYSGTSAAAPAWAAFAAMLNDARFKAGQPALGFVNPLFYSLKSGFTDVTQGAATGCNGVNAQTGAKIPGASIIPWATWNATVGWDPVTGLGIPNFGVLLDTLGLSAYNKTATPSCPSWNTLEYIPSTGSTYKIECGTDHAGGVFSQIYVNGTDRLNNCIMACEGTNGCIDVQLSGTTCYLKGAVGAAVSKPGAVGARLISQPIGKHAQLTDKPSCPSWNNTILNVGTSKYFVECGVDHQGGDLKLAYVNSTIQGCVAACDQTPGCIDSSLSGSACYLKSKVGKAVPNSNVFGTLLISKGNSTA

SEQ ID NO: 2786 - protein, 988 aa, Aureobasidium pullulans
MKGLFKSLTLSLPLSLAALSSAQEAQWPLRSNGLTDLVEWDHYSFKVNGERLFIWSGEMHYWRIPVPELWVDVLHKVKAAGFNAVSFYSHWGYHAPRDGIVDFESGAHNISSLFETCKSLGLYIFYRPGPYINAESTGGGFPGWVTTGAYGSLRNNDTRYTEAWKPYIETVNGIIAEHSIVNGGNVIFYQVENEYGYQWTNTAQRTPNETAIHYMELLETVANDTGINMPTVHNNPNLRSKSWSMDYDINDVGGDTWLYAVDNYPSCWSCNLQECSSTNSPAPDFTVLDYYTHFQETAPGDPSFFAEFQGGSYNPWDGPAGGCRNNTGPDWVNVFYRNNIAQKVTAHNMYMLYGGYDYSAPIQEDRLIGDKYSETKLLGYFIRSAKDLPLIERGINGTNLTTSSNVFTQVLYNVENNAQFYVVRHANTSLQTSLSFKQNMTTSLGNFQVPQHAADIRINGRESKILVSDYNAGDQKIIYSTAEVLAVSIQNGKPIIVFWVPTGESGEFYLKGAQNGNVKQCNGCSSVGFYQTKDGVITSFAQGSGMSVFQYGNGVTAVIVDRSYAYKLWHPTLTNDPHVPLDKTALVTGPYLVRTAAVKGDTLALVGDYNGTTPLEVFAAGVKKVTFNGQSVSVKASAYGSLKGELSHDKVTVQSLNAALPKLSQWKVADGLPEREASYDDSKWVNANHTTTPHWNKPATDHILYADEYGFHGGNLLWRGRFNGTSSGAFINVIGGTGSGWSAWLNGKFVGSTFGDIKLSQTNQTLKFGDAVKAGENVLLVIQDHMGKDQTTGAINPRGILNATLTDGAKFSSWKVAGKAGGGANIDPVRGPYNEGGLHAERLGWHLPGFDDSKWASGSPSTGLSTAGANFYRTTLPLDLPEGHDVSLAFNLHATKSKKLRAQLYVNGYQFGKFVPYIGNQVEFPVFPGILNYHGNNTIGLSIWSQDNVEASVSVDVSVLGVHSSGFDVGFDSTYLRPGWTNERLQYY

SEQ ID NO: 2787 - protein, 513 aa, Aureobasidium pullulans
MKYSSVLAALSAVGSALAQQTYTNPVLWYDLADIDVFRKGNQYYYSASTMSFSPGAPILRSGDLVNWEFIGHSVPRLDFKDTAYDLADGKQAYVRGIWASSMQYREYDNTFYWIGCVDFKTTYIYKASDPAGTWSKVGEIGTCYYDCGMLFDGQNIYVAYGNTKISVAQLNNDFTQKSTTQVYSSSITIEGSHMKKINNRYYIFVTQPASNEYVLKSNSGPLGPYEFKIFTKAPASGIQGSGSPHQGSVVDTPNGDWYYLSFIDAYPGGRSPALAPFVFDSQGWPSLEATNGFAIENPYPVTPVPVKSTTGTDTFSSGKLGPQWEWNHNPDTSKFSFAAGGGLVLKTASVTKDLYHAKNTLTHRILGPDSTATIQLDILQMTSTDQAGLSLFRDNSAYIGIRNGVVILQRDITMGAAWNTLSTGRLETSASLPAKTTNVWLRLHADIKPAGTHQGVFSYSTDGKSFKQLGTPYTMNTTYYFFIGYRFGIFNFAEQGLGGSVVVKSFDLALGAK

SEQ ID NO: 2788 - protein, 252 aa, Aureobasidium pullulans
MLSTIIPLALALVGQVAGQTVYLTGDSTTAPGGGGKGTEGWGQYLHYSMKIPVVNKAFAGRSARSFTREGRFDEVGKLITKGDFVVIEFGHNDGASSPDNGRSDCPGSGTETCQYTYNGVTETVHTFPYYLEQAAKSYVAKGAHVIISSQTPNNPDESGVFVSTPPRFVALAKTAATNAKVDYVDHNAYSFAAYKPLPVSTVNSYFPNDHTHTAPKGADLVAQAFVRGLVCGGSLLSNYVKNATASIEGSCL

SEQ ID NO: 2789 - protein, 253 aa, Aureobasidium pullulans
MRFSTSAIIAASLSLAAAERMGPLRTRASGSFPIPASQGSVTYDDAKTISGSFDGGYKTYGRGVECGGQAEGQNGDAVFVLEDGATLKNAIIGKDQNEGVHCLGACTIENVWWDAVCEDALTFKGNGDGKVIGGGARNAEDKVIQHNGVGSISIDGFTVQDFGKLYRSCGNCKQNGDARKVTITNVKATNGKYLVGINSNYGDSATITKTCASSVKHICQEYKGTSNNDEEPSTLSEGPSDACIYQESDVEAC

SEQ ID NO: 2790 - protein, 454 aa, Aureobasidium pullulans
MRYSLTLAALAAATGVSFAQSAVPAYGQCGGQDYTGSTVCVSGYHCSKNNDYYSQCVAGAGSSGVATTIKTSVVPSSSSTVVTKPPVTTSKVVSTSKVATTTAAAAGSIATTSGTKFVIDGKAGYYAGTNSYWIGFLTNNNDIDLVMQHLASSGLKILRVWGFNDVTTTPTDGTVYYQSFANGEATINTGANGLQRLDYVVKSAEAHGIKLIINFVNNWTDYGGMAAYFSYAGITSNAQWYNSTKAQAQYQKYIKAVVSRYSSSTAIFAWELANEPRCTGCDLSTLKTWVVNTSKYIKSLDSKHMVTTGEEGFGPIPGDDGSYPYQLSAGGSNFTANCEVPTIDFCTYHLYPESWSVTPTQAWGNQWIKAHAQACTAVGKPCLLEEFGASNNCGIESDWQATALKAAGTGADLFWQYGDTLSYGQTSQDGNTAFYGDALYTCLVTNHIKAIDSL

SEQ ID NO: 2791 - protein, 575 aa, Aureobasidium pullulans
MHFNSLALATLALVPSFIEAHGDVPGAPRVFGRRSALSGARRARNVASSYQPIVPEVHEKRQASTNTEGQCGQGFGSCADGYCCSEAGWCGQGSDYCAAPGCQFNFGPACDDNTIPSGSSTSTVARTKLGNVLYGGAGIYDCTVAGTIAITYDDGPYIYTEHILDVLKQYSAKATFFITGNNNGKGEIDNAAYPWAATIKRAYAEGHQIASHTWTHPHLSNITSAQRKQNMYSNEMALRNILGFFPTYMRPPYSDCTAESGCQQDMADLGYHITYFDVDTDDYNNDSPALIQNAKNNFDAGIAGGKPATNDYLVIGHDIHNQTANVLTAYMLDKILALGYKAVTVGECLGDPEENWYRKSSGSVFTSSTSAVTSATKTSATIAPTATSNDGTCGGGSGFMCTGSEFGDCCSQAGWCGSGTLYCGEGCQAGFGQCGINVPQSSSTTSTAPAATATGVSTDATCGGSSGMTCQGSVFGNCCSPAGWCGSTAAYCGDGCQSGFGSCGDSGAAAGAVQATNNAAVSSTLATSATSKVVTTTTAATATKTSTAAKATATNKSRVSTWVNSWLSKLRSGSH

SEQ ID NO: 2792 - protein, 655 aa, Aureobasidium pullulans
MKSVAKLSATALWSSAVALAWRPQYGSPVKAEYGNLVKAHASQDWNGSATQNAPWPFSTSHPWSPSGSLPQNITNGLSTFGTINHPDLGPWTDGPLPQGCPWGLRQSNDTNPYNEKNVPNTGMTRYYEWEISNRTMAPDGVALPLLVVNGQFPGPLIEANWGDWIEVRITNNLNEGTAMHWHGFLQKGTPWYDGTPGVSQCPIAPGKSFTYRFRAELYGTSWWHSHWSAQYLNGLAGPIVIHGPVADEYDVDLGPVMLTDWFHADYYSLVEQVFIATEFGPIFPPMANNMLINGKNNYDCKNTNLTCTPNAGVSQFRFQSGKKHLLRLVNHAAEAVIFFSIDGYQLKVVANDFVPVEPYYTDLVTLAVGQRTDIIVEATGNSTDAVWMRMTEGPSGLGPPRGQTGCSLNDGNSVEALAAIYYENADISKPPTTSNTIDVSRTYFPLNCNNQPLNLTVPKYAIPVKEPDVVLNFTMSAAYNSSGAFKWYMNNETYMANYNDPTLFEAKLGNLDFPEESRVFDLGTNGTVRIIMQSVGFPASHPMHIHGFNMQILSEGIGTWDGVSITNPENPQRRDTQLVQPNGYLVIQIELDNPGVWPFHCHIAWHISEGMNINLLVNTPYVVNEMEIPYVMAQTCRDWSDYSGTTVVNQIDSGL

SEQ ID NO: 2793 - protein, 388 aa, Aureobasidium pullulans
MISTNLWTLLALATPIVSAGGGVHYSTHGKRPQCTVLANGGSTNDVPNILKAFSKCGNGGDIIFPENQNYYIASKLNPVVNDVNIDWQGIWTFSPDIEYWRQNSSTYPIAFQNHAASFILTGDHIRINGYGTGGIFGNGDTWYTAEAGHTVPGRPMPMVFWNVSDVTVKKFFVKDPPLWSFNIMNGTDMWIDELYCNATATQANASQNWVQNTDGFDTMDSKNIRLTNFVYQGGDDCIAIKPRSYNIFVQNATCRGGNGMAIGSVGQYLEDNTVENVIVDDIIRWNEDMHGSVLIKTWVGALVPQNPSANGYYENAGLPRGGGWGSVRNIHFSNFVVQGADAGPTIDQNSGNNGSFAGTSLMDISNIAFTNFTGWLSGKESKNRTASL

SEQ ID NO: 2794 - protein, 417 aa, Aureobasidium pullulans
MLSKALLSSALAALTLLPSASVAAPLEQFKRDLKFNFGNDKVRGVNLGGWFVLEPWITPSIFDATPDNVVDEYTYCETLGSDEAYSRLSKHWDSWITEDDLHQIAAAGMNHVRIPVGYWSVIKDDNAPYVQGAYEFLGRALDWASGAGLKVMIDLHGAPYSQNGFDNSGKRGGTGWGQGDSVSRTITALNKIRDDMASHPAVSAIELLNEPMGSSVGMDTVRQFYMDGWGNLKNSDVAITFHDAFAGVTSWNDWGSGMWNLLLDTHHYEVFDAGALSMDIGSHIGTACGFGGSMATNNKWTISGEWTGALTDCARWLNGRGVGARYDGTYNYNGASSYYIGSCDGKYSGTVSGLDSTYRDNIGKFIEAQLDAYEKAAGWIFWTWKTEGAPEWDMQALLQNGVFPNPVTNRNHPGQCN

SEQ ID NO: 2795 - protein, 526 aa, Aureobasidium pullulans
MPGSKSTRSVLVTGTLLSLASQALGHMEMSWPYPLHSKYNPSNSYTVIDYSMTAPLFSDGSNFPCKGYQNDRPIVPVITYSAGSTYNMTIAGSAVHGGGSCQLSLSYDNGATFRVIKSMIGGCPLTSTYDFTIPSYAPNGNALFAWTWQNEQGNREYYMNCAEVAISGSSASKRDTSSFEALPFIWKANVPGVNTCTTTEGEDPVYPMPGPDVLYGGKMTSSSPANSAAGVCDAATPFGKAYKSLGDTADPQTATVGGNTGSSPTTVKSAASSSQVPTTLKSTTKTSAASSAASSVKQSTASVPVVQSSSIKSSASTVVTLSTVNAGKSKTSSTTPLPSASSTDDECPSDVTLTVYTTAGATAKTSVVSSAATSAASPAASSTPIDPDTEFATGDLSTYLPCVPGTYICTSATTWVTCDSTMYSDGSTSWVYRDARVLGNGASCVPSFSPYSSSTKVYAQQADSPAGFYRDDRIAYPSGAGACAENGDVQCVGTTGFNMCNDLVWFGMGGTASGTSCSNGLLVASS

SEQ ID NO: 2796 - protein, 551 aa, Aureobasidium pullulans
MGLSVLALSLAALPFVAAGGPFLQQTSNNTWIIGNDLWNITQGSIYGTKLYYQGKDAIGKAAGHYVGADGENNLVWESASIVNEGNDFIDVSFVSEKGDLHWVIYDGLAGSYQYFVNRALGDISILRSLFRLDPDRFPNGRTYLKDEPLPSFQSILDGTKVQDETFETSDGTYITKYDWSNYVRDRDFNGVHGPSTGSWYIHPSTDYFSGNHLKQTLTVHRESSTGDAVQLNVVQDTSHFQTQVTTTQPSGKIWGPWLWYLNDGSITDAKQRFQTELAKWPYSWVNDTAYHSRGAVSGTLKLSDGRVAAGAAVFLGDSDNKAPLAQGVNYYYTSYADASGKFSFSNVRTGQYGLYAWSNGGKIGDVYTNYTKSGINVEGNTKLSTLTWSVPSNKRIFQIGDFDKKTTGFIQSGPYHHGLAAQSPANFTYTVGKSNSSDWYYASSNLGTWNVEFDIATLEKSSARLIISLAGYSQSTALTISSNGAVLGSLSKDNVTTDAAIYRSGTVSGEWHQFVYTVSNLKQGKNVISFTVNRYVLWRGFLWDAIALEWA

SEQ ID NO: 2797 - protein, 226 aa, Aureobasidium pullulans
MKSAIAAIPLLLVGSSMAAPLEKRACPNIHIFGARETTAPAGYGSAGTVVNLILNAHPGSTAEVINYPAAGGDSYASSVQAGVKAVTNQINSFAASCPNTQLVYVGYSQGAQIGDDALCGGGDPNQGISSTAATISSSVGSKIKAVIFMGDPRQIPGASYSVGTSKNPGFDPRPSGFTCSAYASRIQAYCDAADPYCSNGNNAATHQGYGSEYGQAALKFVNSKLT

SEQ ID NO: 2798 - protein, 507 aa, Aureobasidium pullulans
MAILRACTTLACVAAVASARQLPIVAADDYPSTPSYPVYTGPSYNTTNGTNGTTIDTKKLQADIDITKLVARAEALAKIADLSLPEYNHPTRVIGSKGHVGTVDYIYSEIAKLGDYYNITNQTFPAVTGNIFEERLVIGHDVPKSASAMSLTPATKGHEPVYGQLLLVPNGGCSAGDFPVNMTGAIAFIKRGTCSFGDKSANAGRAGADAAVIYNNAEGDLSGTLGSPSPNHVATFGISAEEAAPYVARLQNGTKLDAIAYIDATVDEIETTNVIAQTTAGDPENCVMLGGHSDSVAPGPGINDDGSGTISLLEVATQLTKYEVNNCVRFAWWAGEEEGLLGSTYYAENLSEEENQKVRLFMDYENPVGSGELRILYEDWYKEQGLPYTYIAFDGRSDYAGFLDNGIPSGGIATGAEGVKTAEEAALFGGVAGAWYDPCYHQLCDDITNLNLTAWEVNTKLIAHSVATYAKSFDGFPKRTPEIEERSLSSSKKNKPLFKYKGNDLVM

SEQ ID NO: 2799 - protein, 321 aa, Aureobasidium pullulans
MKFTPSFALAALTSLAVAAPHDIVNKRAVASGPVGYASTNGGTTGGQGGATTTVSTLAQFTKAATAKEPTVVYISGKITGNDKVRVSSDTSIIGLNSDSALENIGLFVNKVENVILRNFKSSKVLAKNGDAIGIQASKNVWADHLDLSSDLDHGKDYYDGLLDVTHASEWVTISNVFFHDHYKCSLVGHSDNNAAEDTGHLHVTYANNYFSNVSSRLPSIRFGTGHIFNNYYENVLSSAVDTRDGAQVLVESNVFVKAKKPVASLYSDDQGYAVVKDNDFGGEKNEAPAGTLTKVPYTYTALGSAKVKAAVVGTAGNTLKF

SEQ ID NO: 2800 - protein, 741 aa, Aureobasidium pullulans
MRSLHLLVSSALALLATAAENTTCSSDLEALTVANIDDVRGNLHLPPTAKSGLNVTWSSSNEPVVSNDGIVSRQNATTQVGLTATINCNGKPATRQFSASVRQAAKFGAFEGYAFAYFTNNTKSGENIYFAASNGNNALSWKELNGAQPVLKSTFGTTGLRDPFIIRSHEGDTFYLIATDLSIGSGTSWGDSVKFGSRYLEVWESHDLKTWSEQRHVLVSPAEAGNTWAPEAYYDEGIGAYVVFWASSLYNSTDVDRTGATYHRMLYATTRDFVNFSEPQIWQDAGMSRIDSTVLKEGDTYYRFTKDEGAGETGCTDIIQEKSTSLRATLGSWTTVATCIGKKAGTANVEGPTAFKSNPGDVNGDNFYLFVDEFTGRGYIPLSTKNIASPNWTVPASYKLPPSPRHGTVLPITAAELASLNAGTANTSSPTAPTAGGSPVLKGYFADPNIAVFNQTYYIYATTDGFPGWGGQVFYAWSSPDLVNWTRSAEPFLTLNGTSGNVPWATGNAWAPTIAEKDGKYYFYFSGQNPTYDRKTIGVAIADSPTGPFTAEPTAMILNNERLTTGQAIDADAFLDPVSGKWYLLWGNSYPLLAELADNMTSIKWDTAQNITGLVDFREGLFLVYRKGLYHLTYSIDDTGSENYRVGYATSTSITGNWTYHGVVLQKDVGQGILATGHDSMINVPGTDEWYIAYHRFAIPDGDGTHRETTIDKVTFDEETGLMNVVVPTLSSVEPFSVPAN

SEQ ID NO: 2801 - protein, 415 aa, Aureobasidium pullulans
MWKKSVAILSAIAGLAMAAPLPQDAAAAPATTKYIITLKAGIDPEVGISHINWAGDLHRRGIYKRQENGTVEEDLKVFKVADFNAYAGSFDEETIAELKASNEVAVVEEDLPIYMTAITSQTGSTWGLGRISQRTYTANTYYYDTTAGAGTYGYVIDSGININHQQFGGRASLGSNFVGGSHIDDAGHGTHVAGTIAGSTYGVAKKANVISVKVFGASGSSATSTIMQGFEWAVNDIINKGRAGKAVINMSLGSEDSVSTAFNSLVNAATQQGVLSVVAAGNGISNPQTGAFIEAIDASRTSPASASSALTVGAIGSNNARAYFSNFGSTVDVFAPGLNVLSSWIGSNTATNTISGTSMACPHVVGLALYLKGLESGLTTPAATTNRIIALATTGQGTDLRTGSPNRIVYNNSGR

SEQ ID NO: 2802 - protein, 334 aa, Aureobasidium pullulans
MKFNSLLWLSNLALVQANPFWKDDFSLQGFAKDNPLGETTGGKGGRTTTVSSLPALRTALAGTNPLIVVAKGSFNLTGETRLRIGSNKSLLGHKNGAKFFGGGMSAVNQTNIIIRNIQISYAFDNDCITLQNTTRAWIDHNEFFSDLEHGPDFYDGQVDLVRATDWVTVSWNYFHDHWKSSLIGNSDVLREVDEGHLHITYHHNYWRNIGTRGPAGRFGHQHIYNNLYRDHLYQAIHSRSDNQMLVEGNVFRGNTREAVSTYGLVIPEDSPNTCVCGDFEIDGYVNFGARNDFGKAGVNVTQWGDFKRAPYRYDLTRLSDVEKVVTRGVGIGKI

SEQ ID NO: 2803 - protein, 397 aa, Aureobasidium pullulans
MLSSPILALALSFVVGQSLALPAAVAPPSTNYINWKTFKANGVNLGGWLVQESTIDTAFWNQYSGGAPDEWGLCVNLGSQCGPVLEKRYASWITTSDIDKLAAANITLLRIPTTYAAWIKVPGSQLYSGNQLSFLKTISSYAINKYNMHIIIDIHSLPGGVNGMPFGEKEGNFGWFNNATALTYSYQAVDAAINFIQTSNFPSHFTLEPINEPVDNKNIQFFGTPLALSDTGAAWVTSYIKGVISRVAAVNSKIPVMLQDGFKGETYFSSSFPATANLVFDIHNYYFAGRGATSANEAALICSDAKASAGDGKFPTFVGEWSIQAELNNTFTLREKNLLTGLYAFNKYTSGSAYWTAKFLGTAKVDGQGTQQDYWNYGTFVDLGYTKNVGRGAVYCA

SEQ ID NO: 2804 - protein, 577 aa, Aureobasidium pullulans
MLALLLPNVIAAPTSNTAAYAIKERHAAPLGWTRMSSPADSQIINLQIALRQENSDALTKIAMEVSDPSHPRYGQHLSAKQLLGQGIDTAILSPTRDWITVDLPVRKVESLLKTTYSNYRHTDSSTLMRTSEWSLPESLHENIDLIQPTTSFFRTVKPSIRQDLHHGPMRWHQGAEVLEPGWNYGSNGSACNITDLCNRRVTTLHCLRCLYGTANYKAQAPEKNMIAVTNYLNQTQKRSDIRRYLEIFRPKAAPVADTFPIVPIANASDNQGPLEPGETPSIEGDMDGELVIGISWPTSFMAFSTGGSPPFLPDLATPTNTNEPYLEWQNYLLAQDTLPQVITTSYGDFEQTIPVPYMTRVCEGFEKLAARGVSVIFSSGDTGVGPSDACISNSNSSQSMFLPAFPASCPWVTAVGATQDFEPEVAVSAFGSGAGFSNHFAMPDYQVDAVNGYLEKIGDMHTGLYNRSGRAYPDVAAQGVRIAIVTELRQIAGAGTSASAPIFAAVIALVNDARLAAGKPVLGFLNPWIYGGAFAAFTDVKDGSSVGCDTDGFPAADGWDAVTGFGTPVSATNPAIA

SEQ ID NO: 2805 - protein, 411 aa, Aureobasidium pullulans
MMFSALYQTLLFAFFSVAFAANGSSTYTYQNQGSQAFSLALGLNTTGNDLHFNMTAPSTYSWFAFGVGSQMRNSMMFIGYPSANGTGVTLSPRLATGHQQPQYSSDLNVEVVSSSITNGAYQLMAICKNCTTWSLGTMDTTSTNQPFIFALGPTGSAISSDSTSESIRQHSMYNSFTLDMQQASFSGSDTPALSPSSGAVSSDSGSGSGSSSSSSDTAMSSGGSNTYNMVHGIFMSIAFVILFPLGVLVLRLGHSVIGHGIIQALAYCFVIVGLGTGIYLSQQDPSTRNYNSAHQIIGLVLFSLLAIQALGGLLHHLLFRRGKNSIIGKVHMILGIGLLILGIVNAPLGLNLAGDSKYNKYYIIVVAILGALFLALRAWAVVRNRKISKREGSEKGVLRRGSSSEEGVANM

SEQ ID NO: 2806 - protein, 435 aa, Aureobasidium pullulans
MKTTQTRLAAVAALTSGAVAITCDKDSLQSAFSSIATVDFATWMPANSTFNVPKADIAYPTAPTQLRAACAVQVSVKNGTSNYGFGVFLPDDAVGNGGFAGGINWLDMGAGLGYGFAVMSTDTGHNSVNNNGSWAYHNEGVILDWGYRAMHGSTVLGKQLTTAYYSNDILYSYYSGCSTGGRQGLRNLQLFPDDFDGVVAGAPAWWTNHLQPWTAKVGSYNLPNTSVHHIPPTLFPAIGAEVMRQCDGADGVVDTIISDPEACDFNPDLLLCTPSKNTSCLTVPQLNTLHQIYSDYVDTNQTFVFPHLWMGSEAQWVPLLGLNAPNNLGPHYVQYFLQRGPEWQWQDFDYGVIQQADAQDPGNATADDFDLSPFMERGGKLLHYHGMGDGLIPTGSSVYLHSQIFRTLAPKGVDLDSFYRFFLVPEMPNMMFCLP

SEQ ID NO: 2807 - protein, 385 aa, Aureobasidium pullulans
MSIRRTSALSLVAMGAAGVSAFTASNAGVKNGCFWNVDGLGSFNTQWSVAEFTTSTLSSVQDELSASSYTVEAGNSPLARRFDITNIGISSDNALTLTVPGGQSTGPISSAQITTAYSDILFGSVRTVAMVSGAAGTTHGFTFYANDNQEVDFAFLSSDPSVVHLTNEQVNSTSPFSTYTVSAPSDATSSYHEYRLDWTTDATRFYIDGTLVHTITENVPSQQGFWLWNSWSNGNAWAQGPPATNSVLKIKSIDAYFNRTSVIPSGSCLSSSSNNNAAAAASSTSTTPSYTPAPTATNTKLCPKYDGTVYTATNGDLFEIACGTDFAGGDFKMVWVNSMGACIEACSSTEGCVDVSMSGTACYMKNKLKNALKNSGVNGAKKISA

SEQ ID NO: 2808 - protein, 394 aa, Aureobasidium pullulans
MFFNTIALTTALLAGSSMAEIIWDGRFTETSAAEIGKWSWENQVGAYQYYIHGSGATTDYVNISPDYVNPADKSSSDGARITVDGTSSWNGQTMMRTELIPSTKAAINKGKKFYHFSLKRAAENAPDATAEHQVAFFESHFTELKYGVDGSDGKLQWMTDGKSQFDMDFDADVWHNVAYGIDFDAKTVEFYHSTGADELVSKAGPLSAAVASDGADWHVGVLKFSQTKEDWFFSSVYIEDGELTTSVSGPGGDAATPSKASSAVAESSVAPATTSSAAPASSSSAAAISSQAAVVETTSSAAPAETTPSAAPSSVAAPSSVAAPSSVAAVSSSSSAAPTTLQIMVRPTSLNSSVAAAEATVVASSSTVAAISTSASEAAPSSTDDGCSVEYVYV

SEQ ID NO: 2809 - protein, 636 aa, Aureobasidium pullulans
MLLKNSALLLGALLASSAVAQFPPKPEDVKTVKSKFHQGIEISYKEVDPTVCETTEGVRSFSGYVHLPPHSINETHERQDYPINTFFWFFESRKDPHKAPLSIWLNGGPGGSSMMGALSENGPCFVNSDSNSTHLNPWSWNNEVNILYIDQPNQVGYSYDVLTNITVNLLADNEGPDAIKLGDFSEGVPDQNATFLIGTSSSQNISATANSTQHAAVAFWHFAQTWFEEFPQYKPHDEKISLFTESYGGRYGPTFVKKFMTQNELIANGSISGPGTHYLRLDTLGLINGCIDAEDAASAYVEFPIANTYGIQGFTEEQYFKAKYEYIRKDGLRDQIRECRRLQLETDPNDYGDVENTNTYCYKAAENLGNLTIAAYVESQKCGWFDITHQGTDPFPSTYLMGYLNQQWVQQALGVPVNFTAVSPAVYEAFTHTGDISKGGLLDDLAYILDNGVKVAMMYGDRDYACNWLGGEQSSLHIPWSNASSFASAGYTPLVLSPFSSGGLVRQFGNLSFTRVYQAGHLVPSYQPQAAYEIFMRSLFNRDVATGEIAVSADYGTEGREDGWTPSDVLPKPENECYVLNPGSCSEEEQGWLKDGSAIVKNWILVGREKGGKRGGRGHGEQGSQTVLAEEGIYEL

SEQ ID NO: 2810 - protein, 589 aa, Aureobasidium pullulans
MWSYLLLTLFAVQIHAIWPIPSSSSMGEDALFLDRNVKFIYNGAAQVAAPQPEQIPFEHDPNNFSSQYGTYGQKNASSQKIISTAIKTTTQTLFEQNFVPWKFHPRHSDFEPAMNASCTYIKLIHLEQTDSDPANVTKPLAGDVDESYSLSITSEGQATISAASSVGIAHGLTTFTQLFYKHSSGSVYTPYAPVNITDAPKFQHRGLNMDVSRTWYAPADITRMIDALAYNKFNRLHLHVTDAQSWPLEIPALPLLAEKGSYREGLTYSPSTMAHIQDYGASRGVEVILEIDMPGHTSSIAYSYPELIAAFNEKDWSTYAAEPPSGTLKLNSSAVTDFLDTLFDDLLPRVLPYSSYFHTGGDEVNVNAYNLDDTVRSNDTAILQPLMQAFVDRAHDKVRAAGLTPIAWEEMLLTWNLTLGPDVIVQTWQSDEAVAQTVSKGHKALVGNYNYWYLDCGHGQWLDFYPEVAQNYYPFYDYCAPLHNWRMMYAYDPLSGVPANLTHLVLGGEVHIWSEQTDPVNVDRQVWPRACAAAEVLWSGAKDEQGQNRSQITASPRLSEMRERLVARGVGAEPIQMPFCTQNGTQCAL

SEQ ID NO: 2811 - protein, 419 aa, Aureobasidium pullulans
MSPLSTSRILLLAQLPFLVECHLKLNKPVPYSKSTLQLDPLKNALPGTEQSDFPCQSKRIGGADPFIVDQENELTAGEPQVMTFDGSASHGGGSCQLSVTLDRRPTAESTFKTIASWIGGCPIDNANGGTDPWNYTIPPEVPNGQATLAWSWVSKLSGQPEFYMNCAPITVSGGAEDTTEFDQLEDMFRVNLPSSQCGSQLSSNLEIPNPGKYVTTLDRQALAPPTGSGCAAMSQATATGSNTGSATSSQSSTVTSASTISTPVPSSINTTTTTSSSSVATTSIPPAPTPTTSTIPPPYTNSTSCTTNGLLLCNGPTQFGLCNFNTVIWQPVAPGTICSSNQIIASTNSSANSSDTSTCSPDGSLVCNGSDEFGICNFGHVAFGSVAAGTTCVDGQVLRKRHLGLHKRRELGHRRGGRY

SEQ ID NO: 2812 - protein, 550 aa, Aureobasidium pullulans
MAPYAAILQLSLLGLASQVSAAAIEPRASTPYAPVSASCPSTPLVRTANGLGSSEAAYIAARKPKADAALAAWLQKTDSSFATTDLPTVGLVLSGGGYRALLSGAGLIQGLDSRDSSLSTSGLYQAMTYETSLSGGAWFSTSWTGLNWPTVSYLRDNLWSESFADSLLVPARLLSAVAYAEIVKDIVDKAKAGFQPTLIDVYGRLLSYQLLSTNSQDILTDGAVSKTFSSVASSSNFTNHAVPYPIITARGVNTFEGECIPRENGTQYEFTPHEFGSWDSDVNAFTQTAYLGSKLTNGAPTVSGKCIKNYDNIGYVAGTSSALFNNYCTALPAKNNTQSLAQTLQAIILNAHSPVTRDLYAPYPNPFYKYPASTLTNAQTEIQIVDGGEGNSAMPFWPLIQPERNVDVIIAADNGADTADDFPSGTAIVTAYQQAQLQGLSRMPFIPSLNQFVAQGLNKHAVFFGCDTAETATIVYLPNNNYTYASNIDTVIIQTSEQQTAGIIANGNAIATQNGEDGWATCLGCAVMKKTGSVLPQACTACFDKYCYKQ

SEQ ID NO: 2813 - protein, 408 aa, Aureobasidium pullulans
MFVNIPSVLSLGLLCGSVVAAPKKCPKGFVTTTGTKFQLDGKDFYFAGTNAYYFPFDNNQTDVELGLTAGKKAGLPVFRTWGFNDKNATYVTGGLPQYGAEGAGTTEVVFQRWANGKSTIDVTPFDKVVNAATKVGSKLIVPLTNNWADYGGMDVYTVNLGGKYHDDFYRDPKIKAAFKRYVKAMVTRYKNSPAIMAWELANEPRCAGDAVRNLPSSGNCTAALLTSWTDEMSTYIRSLDPYHLITWGGEGGFNDPSDADWAYNGSDGGDFDATIALQNIDFGVFHTYPDWWSKTVEWANQWIRDHAASGRKAGKPVVHEEYGWLTAAARLQYLNKTAAANETRVAVIGGWQKISLEEKMSDMYWQFGYSNYSYGRNNNDGFTIYLDDAEAKPLVYEHAKAVAALNRR

SEQ ID NO: 2814 - protein, 563 aa, Aureobasidium pullulans
MKYSAVTLGLLLAGTSHAKQYGFLKDNGNGSWIIGNDVWNMTQERIYGSKLYYKDQELVGEATGHYVSYNGAASNLAWTSAKIVKTGSNYIDVQFDATEGEMHWVIFNGLAGAYQYFVNRALPVLGEFRTLWRLDNETFTSAYNADKDGVLPPLSEYAISTKIQDETWKTPEGNYLTKYDWSGNVREQEYWGVYGDNFGSWYLHPGKDYFNGDHLKQELMNHRESATGDAVQLNMIHGTHFQALSNDVLPNGKIWGPWLWYLNDGTKADVDRRYNNEINSWPYKWLDDAAYNSRVASVTGKLLLSDGRPAAGAAVFLGDNHPNKTTLDMGSDYYYTTYADNDGSFRFTDVRTGLYALQAWSNGGSIGDVTTTFLRNDVDVSGSATSKTRLDKLTWSVPTSNTIFQVGDFDRKSTGFAFSGGFGAGRVDKCPANLTYTVGSSKTADWCFAQNAKGTYSIAFPLPVSNTTTSDALLTVSLAGYSQGTTVNIFANDVRIGNLSSSGILSDPSLYRSGTVAGEWHQFEFPINGSALKASNKIDFRVTSLSTSLWRGPIYDAIKLEWI

SEQ ID NO: 2815 - protein, 765 aa, Aureobasidium pullulans
MKSVLSVNALLALAGPAAAYTSWSYTNVSDPYYGQSPPVYPSPSGNGSSSPQWANAYAQARNLLSQMTLEEKVNVTRGFTGTCVGNTGAVPRLGIEPMCLADAPDGIRGQEFVSAFPAGIHVAATFDKDLLYAYGRALGEEYRGKGINIALGPVAGPLGRVARGGRNWEGLSADPHLAGAGMGAITRGIQDVGVIATAKHWLLNEEEFRRNPAVGEGEAMSSNTDDRTLHELYAYPFMDSLRENVGAVMCSYQRANNSYGCQNSKLLNGVLKTELGFQGFVMSDWEAQHSGVASANAGLDLIMPDGGFWGGNLTNAVNNGSVTLDRLDDMVTRQLASFFYVGQGDGYPAAAVHSNLQLQEPVNVQEDHSDLIREIGAAGTVLVKNVNSTLPLKNPRFLSIYGYDATIKATPWQNPSRYGGGYEVNFGWDTFNGTMITGGGSGGSTPPYVISPFQAIQERIAKDKGTLRWDFYSENPSPPYVNTDACIVFVNAYASESFDRTTLADEFSDNLIKNVAANCTNTIVVNHSAGIRVVDSWIDHPNITAVLFAGLPGQESGHSLTDILYGDVSPSGRLPYTVAKKEEDYGNLLNSTISFDPHPQSNFSEGVYIDYRHFDRYNITPRFEFGYGLSYSTFNYSRLQTSRLAGGDLSPFPDAGIAIIQGGHPQLWDELFAVSLEITNTGDVFANEVPQLYVGIADAPKKQLRGFERVPLQPGQSKRVNLPLTRRDLSVWDVVAQQWKLQAGEYAVWVGASSRDIKLEGSITV

SEQ ID NO: 2816 - protein, 393 aa, Aureobasidium pullulans
MQQTLAALAAVAAVAVASPIEPRANIKFSVPQVSTGNTKVAAPPLALSKAIHKYNGTPPTVVQAAAAAAQQSGSVTANSYNGDSEYLCPVSVGGTTLNLDFDTGSSDLWVFSTLQASSQRTGHAVYNTATGRKLTGESWRISYGDGSGASGQVYADKVVVGGVTATSQAVEAATSISAQFQQDTDNDGLLGLAFSSINTVSPDQQTTFFDSVKSTLARKLFTVDLKKGGPGSYDFGYIDTSKYTGAITYVPVNTANGFWQFTTTGYSIGSGATVSSSYSAIADTGTTLMLLPDAIVNAYYAKVSGAKYDDTQGGYIFSCSATLPSFSAVIGGKKFVVPGSYINYAQVTSTQCYGGIQSNSGIGFSIFGDIFLKAQFVVFSMENSTPQLGFASQ

SEQ ID NO: 2817 - protein, 591 aa, Aureobasidium pullulans
MQNILLIAALLGARHVHSFVIPTNGEDPGFVKHEEISVLPEDWSLSHQASADSILHLRVALSHAHKNYIDIAEQVSDPLSAQYGLYLSAQELQASLPDTTILSEAVTAWLCEHNITDATVAHDWIDFSTTVGQANSLLKANFSTYTHKNSDPVLRTQQYSLPIDMSNHIDFIYPTVHFFAPKKNADHAPQLQARQHFPTGPVTCSDGTSTCPPLLKSKYNINYVPKDNTSGSQIAIAGFLERYPNITDWKSFLSKYGLAKSNPAPSFTPISINNGVKSFTGGDLAVEPNLDLDYASVFTGKLPITYYSVGGRPAELSQPGNKPVPTAKLGNEPYLEFLQYVLQQKSPPQVISISYSDDEQTVPLAYARKVCDLLAQAAARGISVIGSSGDGGAAGTGTTSTCVGPDGKHRFVPTFPSSCPWITTVGATASYGGTASYSSGGISNYFARPSWQTNVVAGYIKALNGSHAGLYNKTGRGVPDVSLLGDNYLTLESGFASRSSGTSASAPVFAAMVALINDIRLRAKKPVLGFLNPLLYSDKARTVFRDVADGSQGRGCSDGSWFEPGWEVLAGWDAATGLGEPDFDKLRALLS

SEQ ID NO: 2818 - protein, 632 aa, Aureobasidium pullulans
MPSFISAAVAALSLSSLASANVAYRRQEQGFNSSSSASSQLSTRVPVPIGTGSSSIIGTSSAVSSSVAGGVNPGSNSTATATGGSSATRTGSNPSATASGSTPDSLTINGVTFSLEVNITYSGVEIDLAIQLTKRADETLPQCLTTCAANTECVGTAFNNNTETCTFFSSIDAASRRAAPGVTFATVTGRANNSTSSAAGNGTSSTRGPTFPTSTRTNNGTSVTATPNNPGTNGTFPNAESLICPTYDDEVLLNTDGSQYLIRCGLNIDGTVISVRKARMIRRQATFGNDWIVDCIDTCSALGNCVGTSYNSVQGTCTFYSSVDGLVADANTDSAILVNEAGDVPSATPVVSTVTSTANGVLTTITTTPMTTSTVYSTTTRTIQSCAPGVPCAGAQTVTEVVVAYTTVCPVSAVPTGVATGGAGATITKVCTACAYQPTVVTVYQCPTAPGAPGAGKPTAVATKTISVPVLNGPTGALMTSTVYQTQEHVTTTCGANGCGKATVTAVVSLYTTVCPVSSGASTPAASNPGSSAPAPSSSEAVYVPGTTKPATTETHPASTVPGTTNEATTVQPSTKAATTETKPATTVKASSSIVQYNPSSTTSGVVQYTGAAVKNGMGFAAVAAGVAALVL

SEQ ID NO: 2819 - protein, 397 aa, Aureobasidium pullulans
MSKFTLRWGILATGGIAESFSRDLTVNPETRNVNDIKHEIVAAASSSSADRASQFLKKVGAPSSAKGYGSYEELVADKDVDIIYVATPHSHHYQNAMLCLEGGKNVLCEKAFTVNAAQAKKLSEKAKEKNLFLMEAVWTRYFPLSIYVRNIITSGKIGKVHRTFADLSIGTLPEEAFDNSHRMVNPDLAGGALLDLGIYALTWVFQTLYHTQPESARKAPTVVSSLKKYPTGADEMTTMLLTFPRSEELGGDAHGIATTAFRTTPDPDGKGSAGPAIRVQGDKGEIQVFHPAFRPSKTKLVLFDGTVEEKTFTQPGPGKGSGFYNGFGDDKNPEGEGHGMFWEADECAFALKEGRKEGKYEGLQESIVIMETMDEVRKQNGMTYPEKIETTKFPTQL

SEQ ID NO: 2820 - protein, 544 aa, Aureobasidium pullulans
MFSVFTLFGLALVFGLGSCYILGLGLRPKNYPPGPRTLPLIGNLHQIPSKNEYLQFAKWAKEYGPIYSILAGSRPIIVLSSVEVVKDLLDKRSAIYSDRPEAYAANHIPISKLRMVFMPYTPLWRKVRKIAHSLLSIKVVKNYDAYQEMERKQMLDEMLENPVDFFPSLQRYTTSLAATILFGWRASSSADPRIRKLDDELAALQEAMSTGAAALIDGFPFLRYLPEVLLPAKANIRRALQLGHEVHMENWYAVKKNIANGTLGPCLSIGLARAQEKDEGLTDEEAAYTVGNIFEGGMETTSSTLYAFIQAMLLFPDVQAKAQEEIDRVVGAKRPPVMADAVNLPYVRRCVKELVRWFPVGPLGAVPHACTRDDEYMGYKIPKGAPIILNAWAIMTDPERYPEPRRFNPDRFSEDNDDVSMAEMAAHPDPSKRDTVGFGAGRRICPGMHVADRSMFLGVSGILWAFSITPKQDVHGRDILPDPDNLIVGGIAARPEPFVANILPRVGKAEIVKQEWEDAQKLLDPETKQWKETPEGDWDVTLRV

SEQ ID NO: 2821 - protein, 341 aa, Aureobasidium pullulans
MPHILVTGASGFLGGAVLTAIQKAHPDWTLTNLDLRPPPVSQPGVAYVQADITQQSEVDLAIRKANPDAIINVAGWVPNGSLRYSNSKALRGKVFAINHQGTLNVLSAAQKTKCKAFVQTSSCTVVSDDLDHEYPNMTEDIPIGHATLAYGASKAPAELAVLAANTPAFKTCALRPATIIGPGDTYGVIATIHACIVKGETPWIIGTGDNMYDFAYITNIADAHLLALDNLLSTTPIPASAAGEAIFVSNQQPVYFRDFMLAIWKEFDHVPPFQLVVPTPLAWVAGLAAEIKTWVTGAKAITGASSGLVGWKRRLLSVWKPWRGGEMWDKKIGRNGEEEEE

SEQ ID NO: 2822 - protein, 349 aa, Aureobasidium pullulans
MASILKRASFSPVVTGAALLVLLKGPQNIQRPVYDYLHQLLKPHNIERLITTLKWLFAYGLIKNVNEAINQLARNNFSLRSSKADWDWNNEIAIVTGGSSGFGALFSKDLSQKGIHVVAIDVNPLPSHLENNPKISFFKCDVTDVEAVNSVAAEIKSKIGHPSILINNAGIGGQRPILQTKPEQLKKLMGVNLFAHYYLVQAFLPNMLENRKGHIISIASMASFFTTPGITDYSCSKAAVLAFNEGLSTELRTIHRCPEIKTTVVHPFFADTPIIAAGKAELQKAGAKILDPQDISDAVVDQILNARSGQILLSNGFGPAMRAFRGLPWWLQEGFKRLTESDLSHYLKK

SEQ ID NO: 2823 - protein, 636 aa, Aureobasidium pullulans
MMPFVWLAAATLIGVYIYSYYRCFARNLAAAKQSGLPYVVAPVYGFNRFWLVTHRLWIPLLEKLPKSWTDPWLQFLDPEWTWLLRREPFKAIGSDIFIVCSPGKNALFVADPEATTQIVTRRNDFPKPIEIYGSVDLFGKNVVSTEGSIWRHHRKITSPPFTEKNNHLVWQESLHQAQSMMASLVGKNSEGKGTVTDIAAATMRLSLHIISRAGFGRRLLWPHEELEENGQAGVVPEGHTMTYKDALSTLLENIIAVMLLPKWFLVNSPIKQNKVAYESFTEWGKYMREMYLEKRAEVQAGEKREGMDLMGALVSGAGIKPDQDPEKADKQLLTDDEILGNAFVFILAGHETTANTLHFAMLYLAMNWSTQKLLQDDLDEIFGDRSIDQWDYEQDVPKLFGGMCGAVMNEELRLIPPVVGIPKCTLKDSPQPLTLSGRRVIVPEGTAVTLITVASHRNPKHWPTLCGSNASEAEVEKDLASWKPQRWILDPSKSNSTAAQKHAQQNTHSDSEEDIGGPQSSDTSSHLFSPERGAFIPFSEGYRACLGRRFAQVEVLAVLAAIFREYSVELDLDKYASDEELAAMSEASRRSTWDKAKSTAENLLQHGMGTIITIQMRTGKVPVKFVKRGSEKYKYD

SEQ ID NO: 2824 - protein, 390 aa, Aureobasidium pullulans
MHISLLGAATSLLYVSASAFTPASTSGTDKLNDHGMTKLKTYLHKNRGQNSCSLDNAVKRQEWSSLSKSNKKKYTDAVLCLQSKPARSGSIAPGAKSRYDDFLATHINQTLTIHGTGNFLSWHRYYVYTFEEALRNECGYKGYIPYANWGKYAEDLLNSPIFDGSDYSISGNGEYRNHTGASIPSAATPFIQLPAGSGGGCVTTGPFKNMTVNLGPLAPVFDDITPNPRPDGLGYNPRCLRRDVGVYAASIASTDANSTDLIRENTYIGDFQTTMQGDFAGGLLGVHTAGHFWAGGDPGADIFSSPGDPWFWLHHAQIDRTWWIWQNQDPASRSSVKGNNSLAGTTTLNNSPPSRNTRLDDVIDLGVNAESILIRDALSTTAGPFCYVYV

SEQ ID NO: 2825 - protein, 618 aa, Aureobasidium pullulans
MLSLPIILSFTTSLAAAAGLSDASLKNYVNSLELDYSFNPVKEAYWTSLPHHRRTPFALSPDGSRAFLAYLDNSETDVHIQRVDPKTFAAVGSAVTVKGGKEAGGLVAHNDGFALLTNEALPSGTSNAPADSTPVPVLYRYTEGEQTFKTFLGGPGVHESDGLSASPDLNGDLVYSEKAGLYGAYFVVTDYSGWAEGHFGDSVQYISTNGSLETLPESSAWGCSHNTGIAFEAADAVPFASICAEDQGDIWLNTNNRGMDLSGTKISNENTTNGAGGESMGGMSGSYSNLARYQGEDSYIFSWVSRGAVDLYENSWMGKGYVASANRTNGRNVAIATFSDKQTMDGEQASSVVGAKDGDSQVNWITSGTADCSNAHVATFDGANALVTWEQIDEPQCNNIAMGCQGEFSGSYFQLVNKGSKVGEPLKLMDTYVAGDMVTMDDGRICWPYVNMTWRLDQAAGSYGGLPSSTTKQISFACMSSGNDTSSSSAVASSTAVSSAISSSSAVSPSTVASTQVEVTAATVSTSSSAVASKIPASFPVVSSSSTIASSISSVKIAKIAHSSTSSLATSVSASATTFSTHVRASSTSSVAAKEAPTALADAAENKGEDCKVQYIYE

SEQ ID NO: 2826 - protein, 330 aa, Aureobasidium pullulans
MMHLFSSLSLAASALAAVAVQEPTHDQVPLGPSTLFQIPTLGFGTWNLKENATEAVSYAISTGYRHIDAAAIYGNEKAVGKGITEGLEKAGLTRDDLWVTSKLWNDHHAPGKVEAAIDKTLSDLNLEYLDLYHMHWPVASTRKGNEISFLDTWKAMVQLVQSGKTRRIGVSNFSPNQLDTLLNHTTHVPFAHQMELHPYLPQNDWIQYHKVRNIRVTAYSPLGGTNPTYHQKSKHMPTPLLETEVLIKIANKHNATAAQISLAWGMSRGTSVIPKSAHAARMDENLSSKHVELDADDLETIDQLGRDFTFRYNDPSKSWRVKLYEGLEGV

SEQ ID NO: 2827 - protein, 695 aa, Aureobasidium pullulans
MAQLDTLDIVVLAALLLGTVAYFTKGTYWAVAKDPYAGSLANGAAAKAGKTRDIIEKMDESGKNCVIFYGSQTGTAEDYASRLAKEGSSRFGLKTMTADLEEYDFENLDSFPEDKVAMFVLATYGEGEPTDNAVEFYEFISSEDVSFNQGGGISEKPLANLKYVAFGLGNNTYEHYNSMVRNVTKFLDRLGANRIGAAGEGDDGAGTMEEDFLAWKEPMWKDLADSMGLQEREAVYEPVLEVSEKPEMDAESDDVYLGEPNKNHLEGKQKGPFNAHNPYIAPIVESKELFTVKDRNCLHMEIDISGSNLSYTTGDHIAVWPTNAGKEVDRFMDILGLDEKRHMVISVKGLDATAKIPFPSPTTYDAVVRYHMEICAPISRQFVSALAPFSPNDSIKAEMTKMGSDKDYFHEQVAARNYNLAQLLEFLSQGQKWNKVPFTIFIEGLHKIQPRYYSISSSSLVQKNKISITAVVESVETPGASHMLKGVTTNYLLALKQKQHGDPSPDPHGLNYAITGPRNKYDGIHVPVHVRHSNFKLPSDPSKPIIMVGPGTGVAPFRGFVQERAKQARDGEAIGKTMLFFGCRKKAEDFIYADEWEAYKNDMGDSFEMLTAFSRDGAQKVYVQHLLKQRAAEIDRLLQQKAYFYVCGDAANMAREVNTALSQIISEQRGIPESKAEDIVKAMRNSNAYQEDVWS

SEQ ID NO: 2828 - protein, 195 aa, Aureobasidium pullulans
MKFTNTIALLASASSAIAAPLEARHNPAKPFELDISFSNSPLNGPIQASDGSLWIGKKASTSCPSNISPCPPGTNTSFTSSGDGKLFLNAEVPGGQQVYIRPDGLLTYTIPHSAAMPAGSQISGFEISSLNQVGKFYDYWLCSEDATDKAYRIWLEYRDENGAVKQNGFTGKNACTMVSLLAKDVKEGFAAWEYN

SEQ ID NO: 2829 - protein, 268 aa, Aureobasidium pullulans
MPFNYNKVLVLGATSGIGWALASKLVQNGTSVIVTGRRQEKLDDFVSQHGKEKAEAVQFDITQLDKIPGFVKDIMESHPDIDSIFLNSGIQRGFDFSKPESIDLSSVSEEMNTNYISYIHLVTAFTPYLQKQSKQTSFIFTTSGLALIPMMRCPNYCASKAALHHFILVLREQLKNGPGNIQVIEIFPPAVQTELHDEKHQPDIKNGGQIGMPLKDFTEATWAGLEAGKDQIPVGMSEGSFNGWEQERQKAFHGMNAHIAKMMAQHSQ

SEQ ID NO: 2830 - protein, 685 aa, Aureobasidium pullulans
MALISIIAVVVVVAVVSFINYLNNSKKNQLPAGVQRLPGPKGYPILGSVPDVPDKNSFLKFHEWGQQYGPIYQVNLAGHNHVWITRDSVAQEILGKRAANNSERPFIPSLQADNRNSGHYLPLMSRNELWTRQRKFAKQIMDKSSANAFYNYPELESVRLLFELMTDPSRYNHALESFISRVTCRLGWGTAAPSDELKQRARELLIGVSPNGALTNKLGFLKKLPEAIVPAKAWEFRRYRTESRFFTILQNEVREKLKSKTAPESWMRHFLENKTATGFASDLEGAYAVGMHGIAGALTIAAPMQSFCLAMCHHPQYQSILHEEIDRVCGDRLPKLSDMPNMPVLRAFIRETLRWRPPVPTGIPHESVKDDIYEGYLIPAGSVMHPLEWSISRDPEVFPEPDAFNPMRWLETKYPTYQEPLTKYPTITQYSQFGYGRRICAGMGVAEADLFVGIGSLAWMFSLSASDAEAEKAAELPKEPVPSSLPVHKEAKKATSLPSGMQTPPSETEIEEQLDEHFSEKMLPADTSMLSRKKTVKKPKNLEAGGGLSRAKTVTYKLRLPGSSLPGQFPAFFEQHTGPDTPPSSPKARTAMAGTPDMPAVDNMFNSAADEKASKPDPTLEYSSLLIAKPLPFKFNMKIRNKKKAEYVAREWMFYKMDGEFEDSKCYWEGGNAGNKMYGWGEVHK

SEQ ID NO: 2831 - protein, 413 aa, Aureobasidium pullulans
MKSTIILSAFSLASLGSAAVHGERGFGLQRHQALHSSSSSKGSTVTVKATSSSIKTSTRPTTSVKSSISSVKTSSKSSSKVSSSSKIPSSSKVSSSSKASSSVKVSSSSKAVSSSVKSASKCSASAKASSTLTKRATASSTTLSLAWKAGLSGYPGIETLDMFKQQWVPYISWYSNYEPVAPNIQASDHTVVGAPMLWGKGDQCLTNNPDGPVDKWRLGNFTEYVTSGETNPNVFFGFYEPDCDCPSSSHITDVNVGVQKWNELIKPLRNRGIALGSPPMCTQLDQSWLTNFAAQGVTWDITSIHVNKPTVAEGIKVVEYYVSKFGKPVWVSEFTCVNDQNWSSCGDQATVNAFIDGMVKYFEGNDMVLAYGANNGEGVPGVWNLMTSSWPPQLTATGLHYQSVLKTLASQQC

SEQ ID NO: 2832 - protein, 459 aa, Aureobasidium pullulans
MDAMLPSLGSSKKALLLGAGFVTRPTAEILSDADISVTVACRTLESAKKLCEGLKNCSPISLDVNDSAALEHEVGKNGVVISLIPYTYHATVIKAAINQKKHVVTTSYVSPAMLELDAEAKEAGITVMNEIGLDPGIDHLYAVKTIDEVHKAGGKITSFLSYCGGLPAPECSDNPLGYKFSWSSRGVLLALRNQAKYFQDDKIVEVAGPELMATAKPYFIYPGYAFVAYPNRDSTPYRERYAIPEAETIIRGTLRYQGFPEFIKALVDMGFLEDAEKEFLKPLADAPTLTWKEATAQVLGSSGHTEEDLVWAISSKTSFADNEQKHRIINGLKWIGLFSDEKIEPRGNPLDTLCATLEKKMQYEEGERDLVMLQHRFGITHANGAKETRTSTLVEYGDPKGYSAMAKLVGVPCAVAVQQVLDGKITQKGVLAPMSPEIVEPLRLELKEKYGIEMKEKTL

SEQ ID NO: 2833 - protein, 586 aa, Aureobasidium pullulans
MHSPFWTISTAAVCVAVAQASSLEDVCTSAYAVAALPAANFYQGITIDNASVTANPVYAANASGNVMFPDSTFDYCNISFSYSHDGIEGDNVRLVYWLPSPDNFKDRFLSTGGGGYLISSGDGLSGSLPGGIVYGAAAGTTDAGFGSLSTQFSSVFLLANGTANFHNLNMFGFQAIHEMTVLGKEFTKGFFNMTKDDKLYAYYQGCSEGGRDGWSQIQRYGDQFDGAVVGAPAFRFAFQQVQHAYSDIVEQTLEYYPPPCEMEKILNETITACDPLDGKTDGVVARTDLCKLHFNTSSLIGTPYSCAASPVYMGFPPHPAWPAQNGTVTAKAVQVADTIIQGLRDSHGKQAYLSYQPASIFADAFTQYDTNTSSFTLWPSDFAAQFVLPFLDLVNATSFANLDNVTYDTLKQWMYEGWQMYESTLHTTWPDLSSFHSSGGKILHYHGESDFSIPTGSSVHYRDSVREIMYPHLSFNASNAALNEWYRLFLIPGAGHCGLNAYQPNHPFPQTNLQVMIEWVEKEIVPQTLNATVLQGERKGENEQVCAWPLRPSWSKSGNGTVECRFDSKSLETWEVEFDAFKMPVY

SEQ ID NO: 2834 - protein, 444 aa, Aureobasidium pullulans
MKIYFLLPSILVAGALMTGFARAVNARLSACGQQHASCYHLGIFADLCARLSEHNHPRCECGYTINATSSSSPFALFTDLLETDFLHLYNLPDSIDVPASDAVGWAVQAYNISPLVARGPFGKAAEIDNVVLNPLSRRKDWTGNGTLGGAPGLQVWVRNQQDLLGPVGDQMVRTGEINSLRRDMRYGSFRVAMKMSDVPGTCAAFFWYRNDSQEIDMEYLSRQANYESANGLSPINLVIQSPASASANYNAINTSTYRLETLPFQPSEGYHEYRFDWTPERIVFFADGKPLSEFENAFDGDAPDAPGTMMLNHWSTGNAGWSGGPPAQDAVLTVSYVKAYFNSSNATRESQWNAACGGEVWRNRTCQIPDYPTQGIDPQRMGMKDPGKSYFFMYDEYCTVNQTLYPAATGGPSKSNGASPLLSTPETWTILGWTAIFGLFLLAS

SEQ ID NO: 2835 - protein, 321 aa, Aureobasidium pullulans
MKSFFVSAALVAAADALVARDSPCCFHLTASGGPGGVVGQLSDGQNRIGQGLPGAQYCIDSKGGLTDGNGRGCILTPPTTQFQCDQGASPTDGFSVGCDGKLSIKGNTDFKSCPTGDNGGYNIYTTAPAGQGGCVSVTLSADNCKSGCPAPAPAPAPTPKTCPAALTGAYEYPHLIVPVDSKQADKAFGTSYNGTITSSVSSLFNFDIPSSDSGKTCSLVFLFPEQKNLETSSFDFSGAGGVDFTMLKGTASSSTTYNNKPGVATDYGVTKVSPGTSSVVATFACPAGSAIGFGLSASDGTMLSYFQDYNPSPIGLYITKC

SEQ ID NO: 2836 - protein, 582 aa, Aureobasidium pullulans
MSSSNPSRHFAFALLIPLVLAAANYASLHQQVLGFLGYHSTISSLPTVNIPQTTLVGTIIDNAFPTPVEAFLGFPYAAAPTGALRFAKPVAIQPGNGTFKADTFGPRCPGKQLLPPGGGEDIWSEDCLTANIFRPTSLLKDKKVPVMVYIHGGAFNRGTAKMHNTASMVGFATEAFVAVSFNYRIGALGFLNSKVTEKEGVLNLGLHDQVLMLEWVRDNIAAFGGDEGDVTLVGLSAGAHSIGHHIMNINSPHQYPLFHKAVIESGGPTSRALHPYDSALHEEQFQMFLTLTSCSDLSDTAIIPCLRNASEASIVEASNKVFARWNPSVRWAWQPVIDNNLISRRPLSAWKSGNYANVPILTGFNHNEGTMYVPKTTATSAQFRNFWAELLPHLGKEELGIIEQLYPDPAVYPHSEYLDTRGLDVGAQYKRLEAAYGHYAYVCPVRQTANLSKTPMYLYHWATNRTVLGGANHGDQMWYETFDPSTTSVSSTHEELAGMFHDYIVSFVLTGDPNAVEGRWKRPVWEVWGKGGGQGHKTMVFGAGNDERAGGKGKGVVAELLNDTWGSKQCEFWWSQTPNVED

SEQ ID NO: 2837 - protein, 370 aa, Aureobasidium pullulans
MPSFSTISAAAVLAFAGMSSAIPQYNFGNGTASAVASGRPMTSSVSGRPMTTSAGRPSANSTSSAVAGRPSSNATTPALDGKFCPGLDLSLYIDNSGATFRIECDTNHFGTIIDIQVNITRRAVPSSLDDCLNLCDATATCVGTAFDTNARTCTLYSDVQAAYDAAGIQFAQRVAAGTGNNGGNGGNGNGMTTIPAGGVATSTIYSTNVVTISSCAPTVTNCPLKNGQNAVVTQIIPVASTTYVCPAQTTLPVAPIACTSCPYTVSTATVYSATGGNMVPVSTQVYAAPCPTGTVVVEKVCTACAAMTSTVPAGNTQTVTACNGANCPATSTMAKYTPTTSGMVMYTGAASNVKAGMGFAAMVAGAALVL

SEQ ID NO: 2838 - protein, 443 aa, Aureobasidium pullulans
MSSIALLALLGTVASAAKVCTNVTVPVYINARQAVFNVPTLESNLDATTFALNFTNIGMNFTDVVTTGFQTVTGHYNISAKYCKPQGDNKANPVVQVLTHGIGFDKSYWDLSYDNYAYSYVDVAVAAGYHTVSIDRFGIGNSSHADPLNIVQAPAEVSALHEITTMLRNGTFPSVSHKFGKVVHVGHSFGSLQSYLLTALYPGSSDGVALTGFSMNATWLGQTLADWNLHLARLNQPLRFGNQAISRTKTNTAWLGQNVISILQSALGAVGINLSSYELWEEIATTEVGDIINGWNATVAPVAQNLPTGYLTWSDLTSNIFAFLFPGHFDIGAAVYAEMTKQPVALGEIFTLGNGAPASSPHTGPALVLTGRQDTIYCGGDCLATGGAAASIPAGVAKAFPNASKFEAYIHPNTGHGINFHKNATGAYQVIQNFFSSNGLQSS

SEQ ID NO: 2839 - protein, 535 aa, Aureobasidium pullulans
MSFKHIVTLLSGLAALSAASPLVNAHAAAPTVTIASGVIIGTATGVLNQPTVTGLVNAYLGIPYASPPKRFEAPVPAPAWNTSLNAQKYGAACIQQFNGSVVGPFSEDCLFANVYVPPNTTASNQKAVMFWIHGGDLAIGASSETTFNASSLAVNHDVIVVTFNYRLGIFGFPNSPDLPTSQRNPGYLDQRLALQWTRDNINAFGGDKANITIFGESAGGYSVAQLLANPPKPLPFVAAIMESPLILLPGNGTKNWNNVSAHFGCATANSSLECLQKVDVSDLSGYIQSSGIGLLWPPAIDGATQVESISDAISAKSFAHVPVYMGTNTGEFDGLLKTLGLGKNINNNATEQLFALFGLNLTSITELLAPKYPQKLAPVDLVGQILTDLFFTCPVAKFSRELAANQYDTWRYWYGLVTPTFGSDYAAHASEVNQVFGSYPLQNENGKATSDQIKLSALMQTVWTNFAKDPHCGPGWPQISTNSINNKFGLFGGVRNSSGLQIIPTLTADFACGMLDGVATLSKAGVLEVNTPFKI

SEQ ID NO: 2840 - protein, 144 aa, Aureobasidium pullulans
MHFSTFTAASILALASSTFASKVAVKNNCPQDIFLQITRQDQSHTQQKIASNGGYFSEQLNGQGNSYGITKNQDYYSPNTPKLIWGASDSAGVVYYSLNNVDGNPFNGQSVKLTGNQQSCPAVTSVDGSTKACSNVNDFTLTLC

SEQ ID NO: 2841 - protein, 584 aa, Aureobasidium pullulans
MVSKYAALMALIGSVAAQGYSNSSSIASTTSSASGAAYTNGAEPTVGGTTFLIQTDTTYSDATVLTLSRKRQASSGIASCLATCSDSDRCVGTSYSDDTMQCTYYSSIDSTSSTPSPGTDFALVQDRATSSTTSDVFNGTTPVTSGSPSTRTSGVSVSGANNSTTRATGSSTRSAGVSGVNNSTTRATGSASRTSSTVSRTSGSVPTSVPSSLLTINGVLFLIEIDINYRGITIDFAILSKRAGETLDQCLTTCAANAACAGTGFEDGTCTFYSSIEDGSRVVDTGNTFATVISRAGAIGSGNNGTAPGVNGTTPAPASNVTAESLICPQFNGQVVTSSVDVTFAVSCSQFLIGTTFDITPELLSKRQAVDTGLPQTISNCIDLCSLSESCVGTTFNIARSECTYYSNVDYSTELAGFDSATRVQDNSDGNGEGSVTTTTVVAPGVTSTVVVGAATTATVYTTVVSTVTVYAGSDSTAFPSGAVVTTIFPVGTTTYINAVPTITLPQQQNNAVPTVTVTVGSGAAVETSVVTVTVDSNGNVLGSSTAGAVAGGAAGAAYPTVTVYQNNCPTQAAPVTWTTVFVR

SEQ ID NO: 2842 - protein, 515 aa, Aureobasidium pullulans
MPSPVVIGVAALVVFLVVRYLNSSDIPRIKNLPEIPGVPLFGNLLQLGTDHALVARKWAKQYGPVFQTRLGNKRIVFANTFDSVKHLWVTNQSALISRPTLHTFHTVVSSSSGFTIGTSPWDPSCKERRKAAATALNRPAVQSYMPFIDFEATRSIKEMLADSKDGTIDIDPNPYFQRYALSTSLTLNYGIKIEGSIDNEMLKEITHVEREISNFRSTSNNWQDYIPLMRLWPSNNKKPLEYKQRRTAYMTKLLNMLKEKIRTGTDRPCITGNILKDPEAKLNDAEIMSICLTMVSAGLDTVPGNLVMCLAYLSSEHGQQIQKRALDEINKVYPNGDAWEKCLVEEKVPYITALVKETLRFWSVIPICLPRVSIKDIEWQGAVIPSGTTFYMNAYAANYDESHFTNPFKFEPERYLDKEMSGIEHFGYGAGSRMCAGSHLGNRELYTAFLRLITAFQFVSPKDPRDSPVLDALDANALPTSLTMEPKPFKVGLRVRDRQQLDQWIRESEDRTADL

SEQ ID NO: 2843 - protein, 281 aa, Aureobasidium pullulans
MLPRLLLALVVSTFAIPSACRDVNNTLVARQGWRTNFSLTRGSFGAIGYTFADGADRMQAIMNNCRGYKEGREWTNVDCVFQAIKTASGYALFVLGLGVDSNAMATLIQRAESIATAGAAFAKRQEGLDDLEVFGYIKTNNVTENVVKAPSSMLEGLSEDQLAVFVQMATAGTDSTGNGTLSKRYCPHHNIRSDREWFVFNWNYGIKVQCKAGCDLRHINWNDMYAIMDATTWEMYINNKLNVQYTIYNNANRVVMRCFATLQSNLADSCPEYITGDSCFV

SEQ ID NO: 2844 - protein, 325 aa, Aureobasidium pullulans
MAPKSATLLSALLAASTVYAAPAPLEKRADWVTATIDGAVVSWENNWNVPAQSTPPAVMPAPSAASNNDGQWITATYNGATFSWQANAPTAAPASSPVSSPAQPTAAAPAPRVTNTDPSCRDVHIFLSKGWNEPYPGRQGKLAGAICYGLDSCDYEDILFYNAEGSDYCTAVKEGDNNGINQMTAYAKKCPASKLVLSGYSQGANVASDILGGSDRCGGPNPGLDPSTSPGNQLKAITLFGDTRHVANQPYNVLSGSSESSTDPRTTESLNRMNKFSSIMRSYCEHADPVCASAGPGPFDVDKHLNYFDLYSDDAAGWIKYILGY

SEQ ID NO: 2845 - protein, 426 aa, Aureobasidium pullulans
MSIRSLLSFGLLAAPLVSALPAADHKSTSCRTSTSTSHSTSHSSSHSSTQTSTHSPATSAVVTTTTSSASNTVMTTTLLATATGKTGLNDYAKKAGKLYFGTAADVPGTNETTDKYYRAELANRDDWGQVTPANAMKWVFTEPEQNVFNYTEADIFLRDAAPPGRLVRCHNLNWYNQLPEWLTSGTWTNETLTKVLQNHVTNLVEHFGDRCYAWDVVNEALSDSGTGNLADNSTWRSDIWYNTIGPGYVAIAFKAAEAAVKAKGLNVKLYYNDYNIESAGAKSTAAQALVKSLKDAGIQIDGVGLQSHFIVGETPSKAAQMANMQAFAALDVDVAITELDIRTTTPATAAAQRQQVLDYASSVGACADVDACVGIAAWDFDDTYSWIPSTFPGQGYGDLFFQPGGYNTPLVRKAAYDGCIQGLTSS

SEQ ID NO: 2846 - protein, 699 aa, Aureobasidium pullulans
MLLSSVALAAFVATANALNLQVAASGGNATSPLQYGLMFEDINYSGDGGIYAELIRNRAFQGSTEHPSTLLAYNSVGGTSLSLKNLSQPISSALPTSMNVAVANATDNEVGFSNTGYWGIGVQVQQYTGSFWVKGSYKGEFTASLKSDITNETFATAQVQSQASPNEWVQHNYTFTPTSAAPNSNNSFYLTFDKSGVTGGSLDFTLISLFPPTYKNRPNGLRVDISSALKALNGKFLRFPGGNNLEGDTPPYLWKWNETIGPLKDRPGRPGTWGYENTDGLGLIEYLHWCEDLELEPVLAVWDGFYLGGPVTPQDQLEPWIQFALDELEFLMGSTSTKYGALRASLGYPQPFQINYVEIGNEDNLGGGNSSYSAYRLPMFTSAIKAAYPDITIIASTTTVDPIPDHISLDYHEYSRPDNFVREFNLFDHYNRNHPILIGEYAVIEGNNATMAAVDWSSNRERLAFPSWEGSVAEAVFLLGAERNSDMIIGASYAPTLQNLNSYQWTPDMISFTADPTKDVLSTSWHMIQLMANHIVTETLPTTGGNFGPAYYVAGYNNQTGSHMLKTAVYNATSDVPVSVSFKGVSAGATATLTVLTAPSHDSYNAPGKPEVVTSTNTTITASADGTFKFELPNLSVSVLEVQGRSTYWAGSWGGPRGAWGHGGFGGWTPSFGSWGLNNWKGTGHNKRAIPKGYKEVVF

SEQ ID NO: 2847 - protein, 1953 aa, Aureobasidium pullulans
MRASILSTMIGMAALAACQNSTITSSSTFASSTTLLVASSSSSSSFISSTSSTTASSGTSSSITAITVALDGSAQFTAINAAVNAAQNSGVPTVVVKAGTYSESIAISGTQTVTILGPTASSFAQNQVNIVASGTNGVVNIATSNTQGITLKNLNLTNLATSNYAPAVSIRGSKHGIYNCALVSSSYGVYYSSYGFALIASSYIEGTDKLFYNYPTAYVYGSTIVPTTSNALIMYGKGNVTTGNATLVVDSSSVVQKAGLTNTYVYLAAPNGNYSQAIYRNNNLGSLIAPSGFYGSTCSSAVFYGEFSNSGAGAYSANAQARAAVCDVQLSVAQVSAFAVDKVFGNAFAGYSSFDTTWIDSNVLTTIQKSDAAQIAAASSSSVSSSSPSTSSVLSSSASGSYVSSSASSLSVNMTLSSASTLPNSISSSSTASVSSSSTCATPAPSATLVVSQNATACQYNNISAAIAALPNDSKPYTIYIEPGVYNEQISITRNGKVTLMGATSFKNDYSQNQVKVQFSSGRSTSAGQDEQTPVINAKKTNDNSGLALYNIDFINSYPQTANTAALAADFYGNNMAAYGCSFIGFQDTLLANKGVQVFSNSYVEGSIDFIWGFGTAYFYRSVIATNTKGACVTAQGRVVTTPAAYIFDECFVTYTSTYGSTFGASYLGRPYSNYSTVVYKNSYLDKHINAAGWQVWSTGNPQTSNVTFGEYNNTGPGAWVSGTARASFATNMTDDQVAGYSLSTWVGDISFIDQTAWAYEPSWSFPASTTTGSASSTSSGVPGPTSTSSINAHPESGSIPPQYAVIVSADGQHNASFTNLTAALASLPNDSTNQTIFIYAGTYNEQIPSINRPGAIRVIGYTSGSPGQSYKDSSVTVTFARGLSVSPLPSGHSDAETATIATASNRISFYNINFINSDNLDGLEANYVTLAASIYGNDIGFYGCSFEGWQDTLLTGATTGYQYYESCYISGAIDFIWGYSKSFFKGCTIGAKRQKSAMTAQSRASSSAIGGYIFDQCLFTAATDATVDLTDSVYLGRPYSAYALVVVKNSYLDDVINPSGWKVWSTTDPRTDYITFAEYNNVGPGSWANNVAAREAFGNATLLTSDSYSLATVMDDTAWIDMTYWSSIATPQPAVINTTTSTNVTVSGSSSYNGTVPPSGALIVSKNAIDGVTTYDTIQAALNAAPTSSKTNATIFIYPGVYEEQLIVNKSGTTIFMGYSDSTDDYSQNQVTIQQSYGVDTQGTGSDVDAATVYATGNYFYAYNVNFRNNNGTQQNIASLGFAVKSSKYAFMHGCQIYGNQDTLYISGNMFTFKSYIEGNVDFIFGAGSGYFLNSTVSPNEDGDSITAAKRATNTTSAGFVFDQCTITPAAGSSGFKNVSLGRPWNNFARVLYAGCYLDGSVGSAGWTQWSKSSPQTDGVTFAEYHNYGPGSNTCNRASFSEQLSDADVAQFQLANFFPTTSWIDFSVVDVQPFTAGFGSAPAGCVSSSSSSLLSTLSSSSSTTLPLITTQVTTTIIQKATTYTTLVQGDITSTVVSYVTENDGTTVTPAPILKTSIVKSTEVVTSTTTKAGKTTTVKSTSVVLATATASAKDVTVKQTSIVSSETTVAGKDTTVKSTETDYFTTTVAGKTSTIKATSTVLVTSTSSPKPVTITESIGSVVTVYETSTLKGSTVSSTTTIQAPDVTSSTTLKPSTVTVSSFSVKTTTKGTTITASCVPTAGAARLFRRGLEARAAGTTTIFISTTLTSYVKTSIVTSAGSTIYTSVTSTSTIAPTSTLKAATSTVLSTSLATSTDLVTESAVDATATSIILSTSTITETAAGNTVTSLAYSTEYNTVSLPGSTYYSVATVSSTDKISASAATVTSFKLISSTTVVTADQSTLTVTNSADSTTTIETTLPASTTTVVKTSSLKGSTIEVTVTPAPTTKTTTVKSTSTVFTTVTKTAKNAPACT

SEQ ID NO: 2848 - protein, 780 aa, Aureobasidium pullulans
MRYSLTTAALAFAICSIAAPVANGGDYGSLSGTGAAGASGNNYGSTEVSPSGSAGVGANIGGSGSSSGSADAGASGSAGLGANAGASGSAGLGGSGHAGVGGDHSGHGGIGASLGGGAGGLLGGLAGLGLGHEGGLSAGLGGSGHGYGHGGLGAGIGGSASPSIGASIGGAASPSVGASIGGGALPSVGASIGAGGSAAPSVGASIGGAASPSIGVGLGGYAAPSGSASLGGLGAGLGGAGGLLGGLGLGGNGYGGLGAGAGLGGSGSAGASGSGDASGNAGGDTQVDASGSGPTPSYGSGSPSSPNESSSPDSSAPSGTEAGAASGSPDDASPAPSDSSAAPSYGSDSSSPSGSSSSPSDSSSSPSDTDTDAASASPSDAASAPTYGESSSVADANGSAAAPMYGSDSSAPAPSESAVDAASATPTDASSAPATSAPTLPLATGASGSTYKSYIKRQSYDAGSSSGGLGALTSGSGLGALTSGLGGLSGGSGLGSLPSLGGSSGGLGALTSGLGGLTGESGLGGLAGLGGSGTGSAGAASTGTASTLGGLGALGNLGGLGGASSSGSAGSSDSSSTGTATSGFGSLGSLGSLTGAAGAVPSNDVTGNTGCKKVTFIFARGTTEMGTLGSVVGPGLASALVKDTGSCTVKGVDYPADAAGNANMGASGGPKMAALATQALKQCPDTKIILGGYSQGAMVVHNALGSIDGSKIAAVTAFGDPMNGQSFKGVDDSKVVRYCGSSDFVCDLTGKTQGTGSHLSYGSNLAEAASRLSQIVGVKA

SEQ ID NO: 2849 - protein, 572 aa, Aureobasidium pullulans
MFRQLSIAAVALSLASTQVSAKPIQRRAAGDSAFDYIVVGSGPGGVTVADKLSESGASVLLIEKGQATTGQWNGNNRPQWLDNTGLTFYDVPALDNMIWTQGGSFTNDIFCNDIVGGISGCVLGGSGAINAGLWWKPSSWDWDTLFPEKWSSANMANVTDRVFSRIPGTEVPSQDGKLYYQQGADIIEGALSGANWTEVSANCAPDQKDRVYSNTTFMYQNGERSGPMSIYLGSAYARPNFSLYTNAIVDRVIREGSKITGVEVSNTSPDGFRGTVKANKAVVLAGGAFGTPKVLMRSGIGPRDQLETVRNAEGSKMISEDQWIDLPVGYNLMDNINTDIVVSHPDVIYYDFPDLWNNPNQGDVDAYLNGRNGMLTQSSSNLNPMIWEMLNGTNGLQGLQWTARVDTSLNINNDAKHNMVLAQYITIGQAARGRTTITSDLKMNVSTGVSVMEHESDQVAIAQGIEDMVNVLKNVPGLEILSPPSGMSALDYVKSTTHLYVNHWLGSCKMGNDDGRKENGTSVVDADSKVYGTDNLFIADGSIFPGQTTSNPQAAITIVGERVAELILALNQ

SEQ ID NO: 2850 - protein, 414 aa, Aureobasidium pullulans
MHFARNSALAGLAVIPLAFAQTYTSCNPMDKTCPNDTGLDSASFSCDFTKGKSALASWSAATGTSLTYDGTKGAQFVISGKNQAPTISSDFYIFFGRVDVTMQAAPGVGIVSSMVLESDDLDEIDWEWLGGDSTQAQTNYFGKGNTTSYDRGTYQTVSSPQTIMHTYSFDWTEERIEWLIDGVVVRTLMYADAVGGQNFPQTPMRLKLGNWIAGDPATNAAGTIEWAGGDTDFSKAPFTMYVKTVSITNYNPAKEYEYTDKTGSYESIKLVDSFSGSSSSSASGSSGSASSSATQLKPTAVISNSLNTVAPTSSISVKKAQAQDSAAVVASSNSSSTASTMKSVISSVSASATSAAASASASASASASKSSSHSSSASATSSQPAQQSTNAGVSNTVATGLFSVVGAALALLTL

SEQ ID NO: 2851 - protein, 433 aa, Aureobasidium pullulans
MSFKIAAAAALATLASTVSAHGHLQSIGASGTVYAGFNNSILYSNTKPELIAWSDTVKDNGYVSDYTSPDMICHAGAENAKLSAPVNGGDTVTFNWDTWPTSHKGPLITYLANCNGDCATVDKTTLKWFKIDAVGIISGDSNTGTWASDKLISDGYKWDVKIPDSIASGNYAVRHEIIALHSANNVGGAQNYPQCINLEVKSSGSDNPEGVVGTELYTAQDKGIYVNIYYPGFAADEYDMPGPALYTGGSSSGSASASSASSSAQATSAASSSQASYAASSAQTTYAASSAQTTYAASSAEAASSVASSSAASVTTQAPVVSSAASGGDYVVTAYETDVVTASTAVTVTAGASATAAPAVSEIASAIPSQMLTSTISAGVPTGTASAGVAKPTKALPEGTTLEDLLSWVEYLFAENSSKASTKHRRHARAFHY

SEQ ID NO: 2852 - protein, 796 aa, Aureobasidium pullulans
MRFQGVLGAALLGSSALQHVAASMQPDVQGDLANTDGDIMNAERLETRQSTGKIPVTGVTGNGIQVRMEIRTMQQQYPDMFNVFLLGLRSFMQMDQSDPLSYYQIAGIHGRPYVPWDGIGTAPGFGGGYCTHTSNLFLPWHRPYLALIEQELYKHVQQAAQSFPAGATRDKYVAAAQNWRFPYWDWAAIPCSTCEAFPVLLSNQWATVTTPTGVQTIPNPLFRYDFHPVSVSDMVYNPFASWDVSKRYPTSWDASAGSQNNLLNGIFANSQANYRDRLYNLYTNYNNFSQFGDSAWITASSTNADSLESIHDAIHSSVGNNGHMTYLDYAAFDPVFWLHHVMVDRSFALWQSLHTNSYVEPLAAVGSTFTYPAGTVNDVNSALTPFFKDTAGTNWTSSSVRDMTTFGYTYPELQNGASASSVRAAINMLYGKNAVSADAIANDNVGNSGSSSSSAAPAASSAPSTSKAPAASSAVSTPKAPAAPSAPAAAPSTPKAPSSPVRGSTRQPWQPFTIWKSSPIHIWSPWWKRDNMTSGPYLNTTIGTNGTDDYHHEYICNIVSQKFAMNGSYAVYVFLGNVSTNSTEELQLSHNLVGTYSVFSNMPSDNNHMANMDLKITGTVPLTTSLLGKLESGELQSMLPVHVEPYLRKNLQWRVAKYEGGEVNVADVPDLSLNVVQAPITPAASENEFPQWGAFTALTSVTAGKPGGYSAQYWNCPEDGSSFDSSYSRPASSPTAPVASANSLAGPYGNGTSASPATPQGTGSVNPMSPTTYTGAAGIMSLSGYAIALAAAALLI

SEQ ID NO: 2853 - protein, 369 aa, Aureobasidium pullulans
MVQFSGLAVAALLSGAAIAAPTLQERGSCTFSGSSAASNALKQKKSCSSIIIKDAVVPAGTTLDLTDLASGTTVTFEGTTTFGYKEWKGPLVSVSGDHITVVGASGSVIDGDGSRWWDGKGTNGGKTKPKFFYAHKMTNSKIQNIKIKNSPVQVFSINNSKQLTLSGVTVDNSAGDSGEKGHNTDAFDIGSSSGITISGANIHNQDDCVAINSGSDITVSGSTCTGGHGLSISSVGGRDDNTVSDVKFLNNKVTNSQNGLRIKTVYGATGKVSGVTYSGNVLSGITKYGVVIEQDYENGSPTGKPTSGVPITGLTMTDNTVGVSSSGTDTYILCASGACSNWKWSGNKISGGKKSSKCSGIPSGSGASC

SEQ ID NO: 2854 - protein, 267 aa, Aureobasidium pullulans
MRFSAIFVLASATAAMAMNSTPALFARQSTGATCSNGESACGQGCYDPTAYQCCGSGGQVCPIGNYCASASRCCPNGANCDGQGTSTAEGSSATAVQSGSTILGSSAASAAASSASQSSVSQSSASQTSAAQSSSASSSLSSISSSASSASSVAASSASSSLTSSAAAASSAASSASSSMSSAASSASSSGSKAASSMSSSASSAASSASKSASSASKSASSAASSASKSASSAASSASASATSTGAAVAGPATNFGLALLGLAALI

SEQ ID NO: 2855 - protein, 360 aa, Aureobasidium pullulans
MHLPTIFAPLALLGLSAAIPADHSTSSSRTQGLAQAWTSKGRQYIGTALTIRDDPAEQGIIQSRTDFNSITPENAMKWESTEPSRNDFTFAGADAVADFADKYNKEMRCHTLVWHSQLPAWVSQGNFDNKTLISIMENHIKTVAGRYKNKCTHWDVVNEALNEDGTYRSSVFYNTIGEAFIPIAFRFAEKYAGKKTKLYYNDYNLEYGSAKALGAQRILKLVQSYGAKIDGVGLQAHLSSEATASTGGGVTPDVKTLTNVLKLYTDVGVEVAYTELDVRFTTPATDAKLKAQAEAYARVVQSCINVKKCVGITIWGVSDKYSWIPGVFPTEGAALLWDENFNKKPAYSSVLKTIQSFHKS

SEQ ID NO: 2856 - protein, 245 aa, Aureobasidium pullulans
MKFLTAAAVMLGVASAVPTATIEKRAQQCGQWDSKVTGAYTLYQDLWGISGYTGSQCSDITSLSGNTLNWWTTWSWAGGSSQVKSYANVVTKTNAVQISKIKSLATKWTWVQTGSNVVADVAYDIFTSSTAGGKNEYEIMVWLAALGGAGPISATGSPIATVTIAGHSWKLWYGSNGVNEVYSFTPNGANVSSFSGDLMDFFSYLIKSQGFKDSQYLVSIGAGTEPFTGSNAKLTSSYSLVPAYK

SEQ ID NO: 2857 - protein, 347 aa, Aureobasidium pullulans
MSSIKSIALLALATGFASVANAAQTGKTTRYWDCCKGSCAWPGKADVSAPITTCDKNDNPITDANTASACDGGSAYMCSDQSPWAVSDDRAYGFAAANIAGGSEESWCCSCYKLTFTTTSIAGKTMIVQATNTGGDLGSNQFDLAIPGGGVGIFNACTDEWNAPSSGWGAQYGGISTNTCSTFPKALQPGCGFRFDWFENADNPEMEFERVECPAAITAKSGCKRADDGSQAYPSIASAAAASSSSPAAASSSSAAQKVAAASSSSEAAPAVSSASVASAVESSAAAYSSAAPVESSAAAYTSATAAVESPSSSATSIEATSAAAPSASSSSDDANCNVQYVYEYDL

SEQ ID NO: 2858 - protein, 352 aa, Aureobasidium pullulans
MLRSTLLAVAAALSNVAYGALTYKGADISSLIMLENQGKTFKTSAGVTQPLESILKQSGANSVRQRVWVNPADGNYNLDYNVKLSKRVVNQGMSVYLDFHYSDTWADPSHQTTPAKWDDSTIGQLKWTVYNYTLAVCNRYAAEGISPAIVSIGNEIRAGLLWPLGGTSSYYNIADLLHSASSAIKDSKLSKKPQIMIHLDNGWDSGTQLWWYKNILGQGPLKSTDFDMMGVSYYPFYNEKAYLGSLKYSLQQLAATYGKQLVVAETNWPAKCSKPAYKFPSDATYIPFSSAGQEEWIEAVGQVVAGVKGGAGLYYWEPAFLGNAGLGSSCEDNLLVDGNGKATVGMSAFKNI

SEQ ID NO: 2859 - protein, 290 aa, Aureobasidium pullulans
MHLPSLLLAAGSASVVLAQPLTQLGQRAASKLRFVGVNEAGPEFGEGHIPGRLGTDYTWPDLGSISTFVNKGYNSFRVNFLMERLVPNQMTGPLDAAYLNNLTQTVDGITKLGAYAIIVPHNYGRYNGAVFTSTADFATFWKTVAREFKDNEKGIFDTNNEFHDESSTLVAELNQAAINAIRSVGATSQYITVEGNAWTGAWTWTTTRGTDGKTNSETMGALTDSVDNKLIYQMHQYLDSVCFPCPNTVRKLTTPIRTAPVHPRPVSPRPLAASVSRQQQSGSVIIRRSD

SEQ ID NO: 2860 - protein, 211 aa, Aureobasidium pullulans
MKFTTAVAALAGVAMAAPVAETEVADLEKRATPINYVQNYNGNMANFKYNQGAGTYSASWNNPGDFVVGLGWNKGTTRQITFSGNYQTSGSSYYAVYGWLNNPLTEYYVVENYSYDPCSTGTQVGTLTSDGSSYKICTHTQVNQPSIAGTKTFGQFFSVRQNKRSSGTVNMANHFNAWSQHGFKAGDYNYQVFATEAFGGTGSASVTVSGS

SEQ ID NO: 2861 - protein, 672 aa, Aureobasidium pullulans
MRVTQVIATLAPIGLVAAGPLHGHSRHTHLHHLHHRSLINGTLSTNTTTDTANSTIYADHISYETSTVNVVANFADGTDANSASSEIASSTISSTTAQSDTASPTLSFTSDVSIASGSPSNSSLASDVSTAIPSDASVSVVLAVAATTPTAVGALSQTVDTTTSISVDTVYNTITVNGAVTTASASEKTVTVTDVVTNYVTATFSALTPFKAPAIKVAALSSGSSCAAIKTSIVYLPASQSPTLVAGGASASKVTSSSSKATTVSTTSSKKVTSTSTKKASTSSVKPTSSSKKSSTMITMSSLVQHGVTTKTILTTSSIPAVISSSSQKASSSAKSSSKAASTFAKASSSSCATVAPPASTQTGIVSGCTKWYTAKSGDYCYAIASANGISTDTFMAWNPAVNAPSCNNIQIGYAYCVAAGCSSSAASSAVASSVVATSPAASTVTSATKTSASGSSSASSTSVASTSYKMYTGNGTVAAGWPAQSQWMDFDDMFTANIPIMQQSCANNGWGANDSADEIADIKSSITKVAASSGVDPRFILAIIMQESNGCVRVITTSWSVQNPGLMQDHAGSGTCNSGGVIQDPCPASEIEQMIVDGTEGTSSGDGLVQCLKEAAVTDVSMYYRAARIYNGGLGGYHADDLGTGCCTLCYASDVANRLTGWSSGVSGCTL

SEQ ID NO: 2862 - protein, 534 aa, Aureobasidium pullulans
MFSSTSFAFAYFAFSSLVAEALPAPALSAPSFSLKSYYHGPPAWSPSATYESTSTFPTLSIGSQHIVPTGIVPSGFLASGFYPTASGYAWPTGTGFPSGVTGYPQPTGTGQINATAFSSWWTSYRQASSSTASYNSTASASASSTAPISTGSAALPDVLRGVNIGGWLILESWMNWDVFANTTATDQYSFDSCEGAQDKLEQHWSTYFTESDVEGLAAAGINAVRIPIGFWSYAQSAPYLMGADAYLEKAIGWCRNHGIKVLVDCHGSPGSQNGFDNSGHSGNVAWQQDDNMEQSISILETIAKKYGAQEYADVVFGIQLVNEPISWDQNNIDTTKEWAKKAYTAVKSASTNQDLAVIMHDGFMGPSDWEEVGSAVNGDASLSDAKFWIDVHLYQNQVAADSLLTQDQHIEKACNWSSSELLPSSSTLPVIVGEFSAATNICANPDGSTVAGNVCYIDGCQCSANVDIENWNQPLIQATRKFLEAELDTFEAHARGYFMWNFKGPGAWGYQNAIKYGLIGDKITDRKYPGQCSS

SEQ ID NO: 2863 - protein, 229 aa, Aureobasidium pullulans
MHFTNSVVIGASLIGLAAASPVDLEGRASACSSYTLIDTRGTGEAQGPSSGFLTMNRNIQSQVSGGKVYNTVYPADYSQNSAAGTADIVNHIKTTLQTSPNECFILEGYSQGAAATVNALSQLTGTSNTAVKGVFLIGDPLHKSGLTCNVDSTGGTTTRNVNGLEYNAYSNYIPSSWISRTLDVCAYGDGVCDTTHGYGIDAQHLSYPNDANVQNMGTTFVVGKLKGTS

SEQ ID NO: 2864 - protein, 306 aa, Aureobasidium pullulans
MHFSSFIAPVFALLGAVSGNSLAGRAAQLTQVNNFGDNPSGTGMYIYVPTKLAAKPPIIVAIHYCTGTAQAYYQGSPYAKLADEKGFIVIYPSSPHAGTCWDVSSQKSLKHGGGGDSNAIANMVTYALKKYNADPKRVFVTGSSSGAMMTNVMAATYPELFAAATAYSGVPAGCFVSSSGAVDAWNSTCAQGNVDQSAAYWTNVVKNMYPGYSGARPRFQIYHGSIDTTLRPNNYRESVKEWTGVFGFDANKPQTVKNNFPANGYTTDIWGVDSANPLGKVQGIYALNVGHTVPINGAQDMAWFGL

SEQ ID NO: 2865 - protein, 326 aa, Aureobasidium pullulans
MRSFATIMAAAALAQTAMAHYRFTSLIVGDEVTKEYEYVRQNSNMNSPVTDVTSKDLICNVGGLDTGAQTKTYKVAPGDNVGFALDTPIQHPGPLNVYMSKADGDVSKYDGSGTWFKIFTMGANKPGDNGLTFKADHLSKVTFDLPKDTPPGQYLLRVEHIGLHSASSFGGAQFYISCAQIEVSGSSTAKPSPTVKIPGVYTGHEDSLELSIYYPIPENYQPPGPAVWGSDGSSDSAPASSAAAPASSSSASAKVPATTASSADPTTMATVVKSSTAASTATGSVGGSTSGTSKKYQQCGGKGYTGPTECEASTCKFQNDYYSQCL

SEQ ID NO: 2866 - protein, 290 aa, Aureobasidium pullulans
MPSLSSYILASAGASLVNAQFGNFGSPYPNTTYPGFESENPYTIEGSQSFQWSPPKYPSPWGEGSGDWKESYAKARALVSQLTLEEKVNLTSGVGTNQGNCVGQTGSVPRHGINGLCLQDSPVGVRLTDGNSVFPAGVNVAATWDRGLAYARGRGMGQEHYGKGVDMQLGPVAGPLGRAPAGGRNWEGFSPDPYLTGLMFAESIKGIQSAGVMTSAKHFIAYEQEHFRQSQEAKNWGFNVTESITANLDDVTLHELYLWPFADGIKTSATSIMCSYNQVNTPHLARTATF

SEQ ID NO: 2867 - protein, 221 aa, Aureobasidium pullulans
MKFFATIAALVVAAVAAPVAEAEAEASSPMLIERAGPGGINYVQNYNGNLGQFTYNENAGTYSMYWNNGVNGDFVVGLGWSTGAARSITYSSNYQASGGSYLSVYGWINSPQAEYYIVESYGSYNPCGAGQSGVTQLGTVYSDGATYTVCTDTRTNQPSITGTSTFKQYWSVRQTKRTSGTVTTGNHFAYWAKYGFGNSYNFQVMAVEAFSGTGSASVTVS

SEQ ID NO: 2868 - protein, 647 aa, Aureobasidium pullulans
MHSFTNMPLIPFLFTLFSFVTLSIAGYVLQDDYNSASFFDMFDFFTDSDPTHGFVQYIDQSSAWNTGLISNSNDKVYIGVDHTNTQPNGRPSIRLTSKNAYNSGTLVILDLEHMPGNACGAWPAFWMVGPSWPNGGEIDIIEGVNTQNHNAMTLHTADGCTIYDNGNFTGSLYSDDCYVYAADQTNNLGCQITTSNYNTYGDGFNNVGGGVYAMEWTDEAISIWFFQRGSIPANVLSANPSPDSTWGKPLSQFTGCCDIPEFFSDQQIVFDVTFCGDWAGNVWSSDSTCSALSGSCTDYVANNPQAFGNAYWSINSLQVFEQTAKSSGKVALPDFCSNNNPTQTETFVSSASTISSTETVPAETTSTVSSTVAPTTTETSSTQTSSSESSSSTAETSSTVESASTTSSSSSGSPSSTSSNKASSAAQASSTAAKTSNVDTSPAPASTAETAAATTSSSQALPSMTDVLTTLVLAVAADATSTEWTTVTTTLRQVVSVPPLSELSPTEQPSPTENVETTPAANVETTPTAQSFAETSVLTTIVQAVSADATTTVWTTITTSIERAITAPVDTTITQWTTQQVTQAPDVYTTLWTTITSTVNFQKARRTALPESLMLGGESAAATQSTRIEAPSPSRRWLPRHWGRARN

SEQ ID NO: 2869 - protein, 641 aa, Aureobasidium pullulans
MPLIPFLFTLFSFVTLSIAGYVLQDDYNSASFFDMFDFFTDSDPTHGFVQYIDQSSAWNTGLISNSNDKVYIGVDHTNTQPNGRPSIRLTSKNAYNSGTLVILDLEHMPGNACGAWPAFWMVGPSWPNGGEIDIIEGVNTQNHNAMTLHTADGCTIYDNGNFTGSLYSDDCYVYAADQTNNLGCQITTSNYNTYGDGFNNVGGGVYAMEWTDEAISIWFFQRGSIPANVLSANPSPDSTWGKPLSQFTGCCDIPEFFSDQQIVFDVTFCGDWAGNVWSSDSTCSALSGSCTDYVANNPQAFGNAYWSINSLQVFEQTAKSSGKVALPDFCSNNNPTQTETFVSSASTISSTETVPAETTSTVSSTVAPTTTETSSTQTSSSESSSSTAETSSTVESASTTSSSSSGSPSSTSSNKASSAAQASSTAAKTSNVDTSPAPASTAETAAATTSSSQALPSMTDVLTTLVLAVAADATSTEWTTVTTTLRQVVSVPPLSELSPTEQPSPTENVETTPAANVETTPTAQSFAETSVLTTIVQAVSADATTTVWTTITTSIERAITAPVDTTITQWTTQQVTQAPDVYTTLWTTITSTVNFQKARRTALPESLMLGGESAAATQSTRIEAPSPSRRWLPRHWGRARN

SEQ ID NO: 2870 - protein, 374 aa, Aureobasidium pullulans
MFFPSTLPSLGLLTSFVSAQYYNTTNGTSASNSTTYTNPILNEVGADPWVIRHGDYYYMTYTTNTNITMLRSSVLTDWDNADVKLAFDPPPGMNYSTDLWAPELHQIDNSWYIIFTADPNYDTPSPEVDMWCDYNCPAVHHRMYVLEGSSSDPWESTYTLKSQLNTYDQFAIDGTYFQHDSGLYHIYSCWYRQYDAWPSNLCITKMSNPWTVESNFTERQIISVPDNPWEKTPYGRPWNYRLSSNEGPQQLTNPTTGQQFVIYSAARSDNRNYCLGQLELVGDDPMNPSDWRKDNEGCVFYQNPKEEAYGVGHASFTKSPDGSQDWIVYHGMRDPTNGWSARTIRTQQFTWNADGTPKFPKPGYGPYQVPSGQT

SEQ ID NO: 2871 - protein, 309 aa, Aureobasidium pullulans
MAKARWMGMDKRGTTASLAAKFWSAIEPWPTMTPQLTSDQDASNTYYRPILFLTDNATNVDIEGITFLNSPCWTTFLVRTKDVSFDNVYIEAFSNNASALPKNTDGFDSLNVDGLTVTNTRVNVGDDCFSPKPNTTNIYVENLWCNGTHGVSMGSIGQYPGVKDYISNAYMKNITLLNGQNGARLKAWAGPEVGYGYIDNITYESVHIENTDAPIVLDQCYFNINETTCAAYPSKVNITNVKFINFTGSASGKDNRVVADLTCSPGATCSGIELQGIDLTSPNGTAEIVCNNIQGDIGVPCISEADADN

SEQ ID NO: 2872 - protein, 225 aa, Aureobasidium pullulans
MHFSSLFVAASAFVTALAAPVAGPSAIENGLFSLVERSTPAGTGQNNGYYYSFWNAGGGTVNYNNKGAGEYFVSWQICNNFVAGKGWATGAARKINFKGTYSPKGNSYLSVYGWSTNPLVEYYILESYGTYNPGSGLQHMGTVTSDGSVYDIYKGVRTNQPSIQGTKTFNQYWSIRKNKRSSGTVTTANHFNAWAKLGMKLGSYNYQIVATEGYQSSGSADITVS

SEQ ID NO: 2873 - protein, 808 aa, Aureobasidium pullulans
MRFTTEILAVALALADVTSAQNSTYNATAAAQAQLKAELANLEKFWSYGRSPPVYPSPQGAGEGEWAAAYEKARALVASMTDFEKNNITYGYTSTTNGCGGNSGSAPRVGFPGLCLSDAGNGLRATDGVTGFASGVHVGATWNRNLAYQRAHYMGAEFKAKGVNVLLGPVVGPLGRVAEGGRNWEGFSNDPYLAGSLTFETINGMQNSVIACIKHLIGNEQELDRNPAGNNASMSANIDDKTLHELYMWPFQDAVHAGVGSAMCSYQRVNNSYSCQNSKVMNGLFKDELSFQGFIVSDWGAQHSGVASADAGLDMAMPSSTYWQNGNLSQAVNNGSLSSTRLDDMATRIVASWYHLAGWQNPGHGMPINLTLPHEYVNARDPASKVSTFQTAVEGHVLVKNVNNALPLKSPKFLSLFGYDGIAPLTYTPDNAAAFTLSNFGYSPVNGINATELFALFVSPSVVPTNILPGIAINGTMVTGGGSGAAQPAYISDPFSAITEQAMEDDTWLQWDFHSQKPVVQRGSEACLVFINAFASESFDRPYLQDEYSDDLVMNVAAQCNNTMVVLHNAGIRTIDAWYSNPNITAIVYAHLPGQDAGKALVEVLYGKQSPSGRMPYTVAKKPVDYGNLLSHLTPDNTSNYYTQDNFTEGVYIDYKAFIAQNITPRFEFGYGLTYTTFNYSSLQTKVLSNVSTSEFPPNSTIAQGGVASLWDVIATVDCTITNTGSVTASEVAQLYVHIPGGPAKVLRGFNKQGIQPGKSVKFHFDITRRDLSEWDVVSQKWRLQQGDYPIYVGKSVLDIQLTGSLHI

SEQ ID NO: 2874 - protein, 351 aa, Aureobasidium pullulans
MYFNSIALTTALLAGSSMAEIIWDGRFTEKSAAEIGKWSWENQVGAYQYYIHGSGATTDYVNISPDYVNPADTSSSDGVRITVDGTSSWNGQTMMRTELIPSTKAAINKGKRYYHFSLKRCTENAPDVTAEHQVAFFESHFTELKYGVDGSNGKLQWMTDGKSQFDMDFEADVWHNVAYGIDFDASTVEFYHSTGADKLVSKAGPMKASVSSDGADWHVGVLKFSKTKEDWFFSSVYIEDGELTTSISAPGGEAPAKVSSAPAASSTTAVSSKAPVVASSSSAAAAQITSSKATSSSATAVESSATAVPTTLQTMAKPTSSVASVVSSTATTENAPTATDDAGCTVEYVYV

SEQ ID NO: 2875 - protein, 369 aa, Aureobasidium pullulans
MVQFSGLAVAALLSGAAIAAPTLQERGSCTFSGSSAASNALKQKKSCSSIIIKDAVVPAGTTLDLTDLASGTTVTFEGTTTFGYKEWKGPLVSVSGDHITVVGASGSVIDGDGSRWWDGKGTNGGKTKPKFFYAHKMTNSKIQNIKIKNSPVQVFSINNSKQLTLSGVTVDNSAGDSGEKGHNTDAFDIGSSSGITISGANIHNQDDCVAINSGSDITVSGSTCTGGHGLSIGSVGGRDDNTVSDVKFLNNKVTNSQNGLRIKTVYGATGKVSGVTYSGNVLSGITKYGVVIEQDYENGSPTGKPTSGVPITGLTMTDNTVGVSSSGTDTYILCASGACSNWKWSGNKISGGKKSSKCSGIPSGSGASC

SEQ ID NO: 2876 - protein, 426 aa, Aureobasidium pullulans
MSIRSLLSFGLLAAPLVSALPAADHKSTSCRTSTSTSHSTSHSSSHSSTQTSTHSPATSAVVTTTTSSASNTVMTTTLLATATGKTGLNDYAKKAGKLYFGTAADVPGTNETTDKYYRAELANRDDWGQVTPANAMKWVFTEPEQNVFNYTEADIFLRDAAPPGRLVRCHNLNWYNQLPEWLTSGTWTNETLTKVLQNHVTNLVEHFGDRCYAWDVVNEALSDSGTGNLADNSTWRSDIWYNTIGPGYVAIAFKAAEAAVKAKGLNVKLYYNDYNIESAGAKSTAAQALVKSLKDAGIQIDGVGLQSHFIVGETPSKAAQMANMQAFAALDVDVAITELDIRTTTPATAAAQRQQVLDYASSVGACADVDACVGITAWDFDDTYSWIPSTFPGQGYGDLFFQPGGYNTPLVRKAAYDGCIQGLTSS

SEQ ID NO: 2877 - protein, 414 aa, Aureobasidium pullulans
MHFARNSALAGLAVIPLAFAQTYTSCNPMDKTCPNDTGLDSASFSCDFTKGKSALASWSAATGTSLTYDGTKGAQFVISGKNQAPTISSDFYIFFGRVDVTMQAAPGVGIVSSMVLESDDLDEIDWEWLGGDSTQAQTNYFGKGNTTSYDRGTYQTVSSPQTIMHTYSFDWTEERIEWLIDGVVVRTLMYADAVGGQNFPQTPMRLKLGNWIAGDPATNAAGTIEWAGGDTDFSKAPFTMYVKTVSITNYNPAKEYEYTDKTGSYESIKLVDSSSGSSSSSASGSSGSASSSATQLKPTAVISNSLNTVAPTSSISVKKAQAQDSAAVVASSNSSSTASTMKSVISSVSASATSAAASASASASASASKSSSHSSSASATSSQPAQQSTNAGVSNTVATGLFSVVGAALALLTL

SEQ ID NO: 2878 - protein, 295 aa, Aureobasidium pullulans
MHFTAIALTALAGFAPLIEAHYTFTQLMVNGAPVGRDWQYIRQHTRGYMPTKYGEILENDFRCNKGAGSGANTEVYTVKPGDKIGMKQGFGANGIEHPGPAQVYLSKAPGSVKSYDGSGPWFKVQQDILCKSGNPQALKTDAWCIWKKNNIEFTVPDNIPDGEYLVRSEHIAVHGAHDGQAEFYYSCAQIKVEGGKGNSVPEGVKIPGVYQVKDKAINFSVWGSATTYPDLPGPAVVPGGRTTGSIDGKTSGTTVVTGGQTFGSTNGQTSDFTAAKSAFQGGSPACRAAAEVNAY

SEQ ID NO: 2879 - protein, 513 aa, Aureobasidium pullulans
MRFSSVLAALSAIGSTLAQQTYTNPVLWYDLADLDVFRKGNEYYYSASTMSFSPGAPVLRSGDLVNWEFIGHSVPRLDFHDTAYDLANGKQAYVRGIWASSMQYREYDDTFYWIGCVDFKTTYIYKAKDPAGDWSKVGEIGTCYYDCGMLFDGQNIYVAYGNTKISVAQLNNDFTQKSTTQVYSSSFYIEGSHMKKINNKYYIFVTQPASNEYVLKSDSGPLGPYEIKIFTKAPASGIQGSGNPHQGSVVDTPNGDWYYLSFIDAYPGGRSPALAPFVFDAQGWPSLKQANGFAIANSYPVTPVPVKSTTGTDTFTGPKLGPQWEWNHNPDTSSFSFASGGGLVLKTSSVTKDLYHAKNTLTHRILGPDSTATISLDISKMSAGDQAGLALFRDNSAYIAIRNNAVILQRDLTLGADWNTLSSGRTETSASLPQGTKNVWLRLHADIKPAGSHQGTFSWSTDGKTFKQLGTPYTMNTTYYFFIGYRFGIFNFAENNLGGSVTVKSFDLALGSK

SEQ ID NO: 2880 - protein, 579 aa, Aureobasidium pullulans
MRLEVLTISAVAVFGLGTSVAAHPGPDAKKQSSSTSTSSVASDTAFSYTQVTSDRYATPIASPVKYQSAFAPPYSKAKSLLPSGITYTTYSLNPSATSDGRYGQSAYAALWAGYSYLHTVPFTTTALPTLVATSELVFPPALPFETSSASMKFDKDFVWGVAGSAWQIEGALQQEGRGPGGLDIFGNQKIPALAGQNDSAVTDMNYYLYKQDIARLAAMGVPYYSFSISWSRIVPFGNANTPINQQGLDHYDDVINTCLQYGIKPIVTLVHADTPPSVDYDNATSSTADYLYYAKQVMTRYADRVPYWVTFNEINTGINLQYDTYQANTNLLLVHLPSTGANKDDVAAALRYQDFILGVWGNPLFLGKQYPSSVLNTAVNLTALTPQQIDSIKGSVDFWAFDPYVSQLASAPDDGLASCINNSSHTLFPYCANLTQNGIQQNGWQFGQKSNDYAYIAPQYVRQQLGYVWKTFQPAGGIMITEFGFNPFKDAEKTLPEQRYDLERTLYFQAFLTETLKAMYLDGVKVIGALAWSFVDNNEFGSYENQYGLQTVNRTSGKFERHYKRSFFDLVDFFHNHIA

SEQ ID NO: 2881 - protein, 439 aa, Aureobasidium pullulans
MSIRSLLSFGLLAAPLVSALPAADYKSTSCSTSTSHSTSHSTSHSTSHSSTHTSTHTSTSTHTSAHSSSATSAVVTTTTSSASNTVQTTTLVATATGKKGLDTYAKKAGKLYFGTAADVPGTNETTDKYYRAELANNADWGSVTPANAMKWVFTEPEQGVFNYTEAELFLAAANPNGKRKVRCHNLNWYNQLPNWVTSGTWTNETLTAVLINHVTHLVEYFGDRCYAWDVVNEALSDSGTGNLADNSTWRSDIWYNTIGPNYVAVAFKAAEAAVKANKLKVKLYYNDYNIESAGNKATAAQALVKSLKDAGIQIDGAGLQSHFIVGSTPSRAAQTANMNAFAALGVDVAITELDIRTTVPATAAAQQQQVVDYASSVGACADVDACVGVTAWDFDDAYSWIPSTFPGQGYGDLFFQPGGYGTPLVRKAAYDGCIQGLTS

SEQ ID NO: 2882 - protein, 223 aa, Aureobasidium pullulans
MSYNIMPSFKSVLLVTAYAVLALAAPASEIEKRSETITTNQVGTYGGYYFSNYVETGSDSLTLGTGTYSLKWTSANTDVVAGIGWQTGAARTIKYTGSINAGGDSLIALYGWTTGPLVEYYVIETYGTYNPGSAGTHLGTVTSDGGVYDIYETTRTNAPSIQGTATFHQYLSVRQSKRTSGTITFQNHINAWKSLGLNLGTYNYQIMATEGYQSSGSSSITLQ

SEQ ID NO: 2883 - protein, 391 aa, Aureobasidium pullulans
MAIGNTGLMHSLLCLSASCLLAHQPSSAQEIIVRHSHHFDRAVVKLRKGVEAYSSDNSTQNADCIMLQTILLALEAIVTGEIHGSYRCHLLAAQRLVDSCGDLSSDVQSFARQFLQYHNLANTISCLDPVNVVKSSMQGCQTETTEQVLFSSSLQLKTTTFISNTASMHFSSLFVAASAFVTALAAPAAEPVTGNGMSSLVERSTPAGTGTNNGYYYSFWNAGGGSVTYNNKGAGEYSVSWQNCNNFVAGKGWATGSARNINFKGSYSPQGNSYLSVYGWSTNPLVEYYILESYGTYNPGSGLTHMGTVTTDGSVYDIYKGVRTQQPSIQGTATFNQYWSIRKNKRSSGTVTTANHFNAWAKLGMKLGQHNYQIVATEGYQSSGSADITVS

SEQ ID NO: 2884 - protein, 383 aa, Aureobasidium pullulans
MHSLLCLSASCLLAHQPSSAQEIIVRHSHHFDRAVVKLRKGVEAYSSDNSTQNADCIMLQTILLALEAIVTGEIHGSYRCHLLAAQRLVDSCGDLSSDVQSFARQFLQYHNLANTISCLDPVNVVKSSMQGCQTETTEQVLFSSSLQLKTTTFISNTASMHFSSLFVAASAFVTALAAPAAEPVTGNGMSSLVERSTPAGTGTNNGYYYSFWNAGGGSVTYNNKGAGEYSVSWQNCNNFVAGKGWATGSARNINFKGSYSPQGNSYLSVYGWSTNPLVEYYILESYGTYNPGSGLTHMGTVTTDGSVYDIYKGVRTQQPSIQGTATFNQYWSIRKNKRSSGTVTTANHFNAWAKLGMKLGQHNYQIVATEGYQSSGSADITVS

SEQ ID NO: 2885 - protein, 417 aa, Aureobasidium pullulans
MKIYFLLPSILVAGALMTGFARAVNEHNHPRCECGYTINATSSSSPFALFTDLLETDFLHLYNLPDSIDVPASDAVGWAVQAYNISPLVARGPFGKAAEIDNVVLNPLSRRKDWTGNGTLGGAPGLQVWVRNQQDLLGPVGDQMVRTGEINSLRRDMRYGSFRVAMKMSDVPGTCAAFFWYRNDSQEIDMEYLSRQANYESANGLSPINLVIQSPASASANYNAINTSTYRLETLPFQPSEGYHEYRFDWTPERIVFFADGKPLSEFENAFDGDAPDAPGTMMLNHWSTGNAGWSGGPPAQDAVLTVSYVKAYFNSSNATRESQWNAACGGEVWRNRTCQIPDYPTQGIDPQRMGMKDPGKSYFFMYDEYCTVNQTLYPAATGGPSKSNGASPLLSTPETWTILGWTAIFGLFLLAS

SEQ ID NO: 2886 - protein, 401 aa, Aureobasidium pullulans
MRLTALATVASLTLTQTAYSQTTSSCNPTQQYSCPADPALSKSVNVDFTSGESDQFTASGLPTYDSNGASFTVAQSGDAPMLTSNWYIMFGKVEVKMKAAPGQGIVSSCVLQSDDLDEIDWEWVGNQQDQVQSIYFRKGDASTSGRGAAFHMDNPTEDFHTYTIDWTSTELVWQVDGKTQRALKATDAGDQYPQTPMLVKLGIWSGGDSSNAPGTIAWAGGNTDYSAGPYTMVVQSIAVTDYSTGKSYSYSDQTGSWTSIKAAGGSINGGSTNVDTSAPAITSVVSGAVPFEGTHRTSTSVSTPGIGNWRATASGMTSTVATTYPGLPSGWTVNGSGKVVPPSKATTGESLDPDRNPLNSDTDQLFSFDTPSYASPHQLQSFFGFSHGLPLVKTLPRDPAS

SEQ ID NO: 2887 - protein, 455 aa, Aureobasidium pullulans
MKTFHAVAALTVAAASAVQAMITCDSNNPCPSSAPCCSSYGFCGVGAYCLGGCYPKDSFSMDSCMPAPVCKSSDYDFNNMNGFIENTEYLGDPSSGNWVFSGDPLMYNNEAVLLTMTEDSSGTLLSSTRYVWYGKMSATMKTSRGAGVVTAFIMMSDVKDEIDFEFIGTDVQTAQSNYYFQGITDYGNEKNLSSPNTDSQWHTYTIDWQPDSLSWEVDGKVLRTLYRNETYNETAGQYHYPQTPSRVQFSLWPAGKAGNAQGTIEWAGGEIDWSSPYMQNGYYYAMVKDVTVDCYNPPAGYNNQGNKAYWYENKYGTNDTVVVGNNGTTLSSFLATGEEPKKGASSSASNTATKSGGKSSASSSATAQPETIPGVSGGGSRESGSDVASGSGSSSGSSGSSGSSGSSGSSDSGANTGSSSFSQGLETGSGTNDGNRVVAGSLVALVAFFAAAMML

SEQ ID NO: 2888 - protein, 388 aa, Aureobasidium pullulans
MRATLLVLIAALAYVSQASRYVLYLTAQHEVYPPAVHIADVTHVTLAFMKSSIFNGKPPSKWPLFTDVETVRKKFPKKDLAVLIAIGGWGDTRGFSAAAASQMGRKAFAENIKAMLDSTGADGVDLDWEYPGGNGEDYKQITNSEKSWEVGVYPKLLAEIRAAIGPDKIMSAAVPGKPVDIQVAFTKDTLVEAMKYLDYVNIMTYDLMNRRDNVTAHHTGIDNSLIAIDTYLNNGVPAEKANLGFAFYVKWFRTTEECAQKALGCKTVEMEDPKTGRDLGQSGAFSWHDKIPTELKKSFEKAVPNAMYDDDGNYYWDAEEKIFWSWDTPASMAKKFPAIVQPRKLGGVFAWGLGEDANAFIHLKTLNAVFRKYLKLKPKGNRPAKDEL

SEQ ID NO: 2889 - protein, 473 aa, Aureobasidium pullulans
MKLPFIAPLVLTISSSILHCSAQLVGPVGPTTSLTQKTHICNILDYGAVADNVTDISSALHAAFDNCVQRNQGSRLYVPTGNYLLKQSVVLSNATSWALQLDGLITAAYGGDWNVERELILQGFAGRQKLGELIDGEGDKNFLLDVLVIVNAVDFEFYSSNGLGAIQGQGYLYRNLNNNDRPRLVRLISPTNASVHDLILVDSPKFHFVFDYGLNIEVYHLTIRGANLGSYDGIDAVTNRDECVSVKSPSNHALVENLLCNQAGSGISIGSLNVSAQISNIHARNISILNGNNVAFIKTYPGGSGYVTNVTWENFRSKASLYGLSINQYWQNTFTPDTGAVALRSVANGVQRPPLYLVANDLTFALNVTVQDIKLWTEAGSSVVNHINNIFGRGDNIYSPGDGIRTSPANGTPTSYSSTITVTQAPTGWVGPGYPAWAVPTTGYGTNVPIPVYTPAVLWKPTGDYDKHYWGSF

SEQ ID NO: 2890 - protein, 437 aa, Aureobasidium pullulans
MISTNLWTLLALATPIVSAGGGVHYSTHGKRPQCTVLANGGSTNDVPNILKAFSKCGNGGDIIFPENQNYYIASKLNPVVNDVNIDWQGIWTFSPDIEYWRQNSSTYPIAFQNHAASFILTGDHIRINGYGTGGIFGNGDTWYTAEAGHTVPGRPMPMVFWNVSDVTVKKFFVKDPPLWSFNIMNGTDMWIDELYCNATATQANASQNWVQNTDGFDTMDSKNIRLTNFVYQGGDDCIAIKPRSYNIFVQNATCRGGNGMAIGSVGQYLEDNTVENVIVDDIIRWNEDMHGSVLIKTWVGALVPQNPSANGYYENAGLPRGGGWGSVRNIHFSNFVVQGADAGPTIDQNSGNNGSFAGTSLMDISNIAFTNFTGWLSGKESKNRTASVSCSKVHPCFNINFDNVTLTTAQNSTSTGTGSCSYMSPGGVHGLSGSGCS

SEQ ID NO: 2891 - protein, 465 aa, Aureobasidium pullulans
MRFSNAAVVSTILFLSVCAAELECASRTPTASQATLPLHLGPTYPTSSSLATSAEPHTVHTQCEVVPLGWGRDDAPQILKAVELCGNGGTITLPAPYTYTISSRLYMRLTRATLNVHGLLSFTPDLGYWIENSHRVEFQNMSTAWIIEGNDFIVDGGGWQQGGINGNGQAWYGRAAGQSNQYGRPISLSIYNSANVSINNFAFYQPQFWSVWAQDSRNITMTNIYINGINTDPAGNSSNYAINVDGIDTMRVDQMRLENWTFHGGDDCFAPKGNSTNMVLRNFTCIGGGIAFGSVGQYPGHPDFIINVSVSDIRVSQKIDAKYGGAAVAAGAYFKSWVGVEMGNPPQGGGGGTGRVSNVTFHNLIVENTTQAVYINKCYFKVPAQGAYCNTSTFEFQDFDFNNVSGTVRTPIGVNLNCSQAAPCRELKFSELNLRQSKTNKTAIAVFENAQNVFGLSEGTRMFSH

SEQ ID NO: 2892 - protein, 970 aa, Aureobasidium pullulans
MSGFKSLALLLAAQLANAQGGYPNPPVDGLPFPGTNYPGSEVPYAVAGAKFNQTSPPYYPSPWGTGAGEWAGAYEKARAFVSQLTLAEKVNLTTGVGWESELCVGNTGSIPRLGFKALCLQDSPLGVRFGDFVSAFSAGVTVAATWDRKLAYERGHDMGSEHRDKGVDVMLGPVVGPLGRSPEGGRNWEGFSPDPVLSGVLNAETVKGIQDAGVIACTKHYILNEQEHFRQGGPNISDAVSANVDDITLHELYVWPFADAVRAGTGSVMCSYNQANNSYVCQNSHLLNKVLKAELGFQGFVVSDWAGQHSGVSSALAGLDMTMPGDVSFDSKTSFWGANLTIAVLNGTVPQYRIDDMAVRIVAAWYLVDREDTQLEDGPNFSSWTSRTEGYRHYIAQEGFEKINSHVDVQGNHRDNIREVAAKGTVLLKNKGGLPLKGTEQLVGVFGEDAADNQYGPNGCSDRGCDNGTANFPYLVAPHTAIENEVRSHGKSVESILDSYAYSQIDVLAQRTDEVNGACIVFANADAGEGYIIVDGNQGDRNNLTLWQGGEAVIEHVSSLCKNTIVVLHTVGPVLINDWYEHENITAILWAGVPGQESGNAIVDVLYGKVNPSGKLPFTMGKTRESYGTDLLYEYNNGGAPPQTQFEEGVFIDYRAFDRSGETPVYEFGYGLSYTNFSYSDISVSVNTAAPAYKPNSGFTDAAPIYGTVSNNSADYVFPDDVRRIEYYIYPFLNSTSLRASSGDPYYGSNYSFPAGSSSSAPQPLLPASGASGGNPGLYDVLYTVTATVTNTGAVEGEEVPQLYISLGGPNDPAVVLRQFDKFSIAPGASKTFTAEITRRDVSNWSPELDDWYVSEYPKTVYVGSSSRKLPLKAALPANGATSPGTGNGGSGNGTYTVPPVSVSSSAPGTATLPSSSASKSSSSSKSSSHSASHSTSKSSSHSSSYSTTKTHGPTSWTTYTMPTGYHSTS

SEQ ID NO: 2893 - protein, 1312 aa, Aureobasidium pullulans
MKTSLAVLGAATLCAASVSNTTKDGLITNGLVSLGDWQSAFDKAQNFVSQLTTEEKITIIGAGSLTNTSANWTALGISDGPQGAQNFYYESAFSMTCALAMTWDKDAIYKQGKAVATEFYQKGLQMLAGPVSNPMGRSAWGGRNGESFGPDAYFNGILGGISAKAYQAGGVIAGGKHFILYEQETNRTSSMSGGGGMGGGMGGGPTGSGNSTMGASTSGSAPSGSAPSGMTLKARADNSSTTQSSTESAPYSSNIDDKTFRETYLWPWYDIIKAGTGAVMCAMTEVNNTAACEDSSLLMGMLKTDLGFPGMVWPDQNGQKTALGSATGGLDYGSSSTWSTSTIEAFLSNGSLSEARLNDMVIRNVIGYYRANLDNGEQPSKADYDDYVDTMSDHANIIRENGAKSIVLLKNDGALPLNKPRRMTLFGANAGPVMGGPNLQFTVQGSGPTYQGHLASDSGSAQSSLPYLITPEAALTLRASKEHTNVKWILNDTYSTSSSGNTLVTLSSSETAVDASYAGYAAASDVCLVFINALSGEGADRTELYNKDQDTMVNTVAANCNNTIVFITSTGIRLVDQWIENENVTAVLYSGPLGQESGNSITDVLYGDVNPSGRLIHTIAKNESDYNVEICYTYNCNYTEGNYIDYKYFEHSNTTARYAFGHGLSYTSFGYSDIKTTKLMSNLSYHAKGRLEVGGRADLYDVVAEVDVNVQNTGSRDGAEVPQLYIGYPEGSGADQPLKALRGFERVEIKKDEHSQVKFQLRRRDLSFWDVTAQEWALPTGDFKIYVGASSTDIRQTEGGDGGLLRLNLWLGSTINIEGEQSNACFKQTYPEIDMCRVVLTVATSPTSHNYMEVWLPSGSTPWNGRLLGTRNGGLAGCIEYEDMAYYSSLNFATVGDNGGHNSSTSDGSKLLNNNEAVIDLSYRSRHISVVAAKQVIKQYYSQPASYSYYVGCSTGGRQGLKSAQEFPDDFDGILAGSSASDFNHLSDWTSRFLLITGFGSDARALSKDQWVYVHEEVLAQCDEPLDGVADGILEDPTICEFNAAALQCGTSSDSRCLTQTQVQTVNDVYSELYDQNGNLLYPSLSLGAELVASQQGLFTGSVIGNAANFISNAVYNDSNWDPRSLSQETFTRADETDVLHGNISSWNGDLSAFRRAGGKLMMYHGMADPNIAGENSQRYYLHVAKTMGASDEQLDEFFRFYRISGNGHCSSGGEGAWEFGQIAAARNGKFSAVQQLVDWTEKGIAPDTITGTKFHNDDPNQGVAFERSHCRFPYRTTYKGNGLDPNVTTSWTCEKINNWQECGPGALPRLC

SEQ ID NO: 2894 - protein, 961 aa, Aureobasidium pullulans
MKGLFKSLTLSLPLSLAALSSAQEAQWPLRSNGLTDLVEWDHYSFKVNGERLFIWSGEMHYWRIPVPELWVDVLHKVKAAGFNAVSFYSHWGYHAPRDGIVDFESGAHNISSLFETCKSLGLYIFYRPGPYINAESTGGGFPGWVTTGAYGSLRNNDTRYTEAWKPYIETVNGIIAEHSIVNGGNVIFYQVENEYGYQWTNTAQRTPNETAIHYMELLETVANDTGINMPTVHNNPNLRSKSWSMDYDINDVGGDTWLYAVDNYPSCWSCNLQECSSTNSPAPDFTVLDYYTHFQETAPGDPSFFAEFQGGSYNPWDGPAAFPLVGTSYDYSAPIQEDRLIGDKYSETKLLGYFIRSAKDLPLIERGINGTNLTTSSNVFTQVLYNVENNAQFYVVRHANTSLQTSLSFKQNMTTSLGNFQVPQHAADIRINGRESKILVSDYNAGDQKIIYSTAEVLAVSIQNGKPIIVFWVPTGESGEFYLKGAQNGNVKQCNGCSSVGFYQTKDGVITSFAQGSGMSVFQYGNGVTAVIVDRSYAYKLWHPTLTNDPHVPLDKTALVTGPYLVRTAAVKGDTLALVGDYNGTTPLEVFAAGVKKVTFNGQSVSVKASAYGSLKGELSHDKVTVQSLNAALPKLSQWKVADGLPEREASYDDSKWVNANHTTTPHWNKPATDHILYADEYGFHGGNLLWRGRFNGTSSGAFINVIGGTGSGWSAWLNGKFVGSTFGDIKLSQTNQTLKFGDAVKAGENVLLVIQDHMGKDQTTGAINPRGILNATLTDGAKFSSWKVAGKAGGGANIDPVRGPYNEGGLHAERLGWHLPGFDDSKWASGSPSTGLSTAGANFYRTTLPLDLPEGHDVSLAFNLHATKSKKLRAQLYVNGYQFGKFVPYIGNQVEFPVFPGILNYHGNNTIGLSIWSQDNVEASVSVDVSVLGVHSSGFDVGFDSTYLRPGWTNERLQYY

SEQ ID NO: 2895 - protein, 1318 aa, Aureobasidium pullulans
MRILPYLALIGLAFAEDGLSGWLRYAPLPSSVSWPYIPHNIVVLNTTKTSPVYTAGQELQRGIQSILGQDCHVSSDSTHESIIVGTLDAYVNAYGNLSQTVDLKEDGFWLSTEGNTVQILGQNERGALYGAFEYLSMLAQGNFSSVAYASNPDAPIRWVNQWDNLDGSIERGFGGASIFFANGSIVDGLTRVAEYARLLASVGINAIVVNNVNANSTILTPDNINGLGRIADTMRPYGVQIGLSLYFASPTQGIKGQANLTTFDPVDPEVVAWWTNVTSQIYDVIPDMAGYLVKANSEGQPGPITYNRTLAEGANLFAKAVQPYGGIVMFRAFVYNQLNESDWKADRANAAVDFFKPLDGEFDDNVVLQIKYGPIDFQVREPASPLFANLRKTSMAVELQVSQEYLGQQTHLVYLPPLWETVLGFDMRVDNETSLVRDILAGRTFERSLGGYAAVVNVGTNQTWLGSHLSMANFYAYGKLAWDPTQDTTMIHEDWTRLTFGLDQDVIDTITQMAVESWPAYENYSGNLGIQTLTDILYTHFGPNPQSQDNNGWGQWTRTDHDTIGMDRTVSNGTGFSGTYPPQTAAMYENISTTPDDLLLWFHHVPYTQHLKSGKTVIQHFYDAHYAGAETAQTFAPRWQSLQGKIDDQRFNEQLYRLQYQAGHSIVWRDAIVDFYHNISGIADDHNRVGNHPWRIEAENMDLNGYKIYTVNPFETASNHHAVITSSNSTVGSISTTLSFPSGKYNIGVNFYDLYGGKSRFEIRVANESGRPVYSSNEFMPFISKKSVTGMALHVLAEASGSKESLDLASMICVCAYAGYFLQEIVLSKGSNETGFESVLHARACGFFATARAWMTKLLESPHTRLAELQALTFGCMLAQEAGDIPAARAALKACSDLCIRLELNRHINARGYECDDQDLEAYYCFALCYLNDKGMALNSLEPSFMNDATIDLEVLQHPDSTVGSTDNFSIYLELAQVQSRITSELLPAKSNSRPRATIISRLAAEMNQIWHSKIRWQTRLNQDSVSRNATWEMESIILDLAFFSILTVIHHSSTHTEAAYNAGDPCLDAAREAASRLQRIRQLSQTLRYSSDYMKNSFVHGTMLFYPFTPFFVLFCNVIQVYDYADYHRMKYFVDFLSELKNISKHEFTPQDLGNKSVQNEQFAQPNTPVAKLHALCKTFCDLAAGVLRGTAAASKSFPQQALAPRTSCAASSALHEGTMPSHIHLWDDSQNHYHIPSSTLSTNGLAAPLQQQQVTPNTTDPSKTYSSHYHAAETAVNEDFSWLSDFAATQPVLQWLDADLSCLDSGSWDSNDPTPL

SEQ ID NO: 2896 - protein, 548 aa, Aureobasidium pullulans
MKVLPFLYAIPLVSAIGSRQHKRDVETLSLEKRDINPELLYPEYNISVPVDHFHNSTLYEPHSNATFDLRYWFDASHYQPGGPVIVLQSGETDASGRLPYLQKGILAQLAQATHGIGVVLEHRYYGTSFPTPDLSTKNLRFLTTEQALADEAYFARNIVFPGLEHLDLTSKSAAYLGYGGSYAGAFNAFLRVVYPDVFWGTISSSGVTKAIYNYYDYFTPIAENGPPKCISTQKTLIHIVDTILLKNQSELTHQLKTAFGLGNLTYDDDFASTLSSGIEGWQSRNWDPKVGSLGFDRYCNNISSDAMLYPAASSLRPVVESLIKNTNYTVEETLVNRMLNFIGYVNRTSVASCSGGSTQDECFSNHNSSTYQQDDLASYTWRSWAYQYCSEWGYLQTGYAPPGQLPIVSSLLDLEYESIVCVDAFNITTPANVDAVNKYGGYDISYPRLAFVDGSADPWRPATPHAYAQGAKERNSTSSEPFILIDGAVHHWDENGLFPNETTASLPPLPVADTQRQEIQFVQEWMQEWQLEQQIKAAYRKPATQGPI

SEQ ID NO: 2897 - protein, 327 aa, Aureobasidium pullulans
MTPLSILILGVLAEFTSAFPGMGNMRREAGVLPRRAAASAVSSANTAASTYPAWHPAQKGEVRSPCPGLNSLANHDICPRSGKGYTIPVLTDCLKRGLNVGGDFALVVGTAGIGSNPSPLTSGLYFDLDMLDRHDFLIEHDGSLSRADTTTGDNHSFNQTIWDTVLAYYSGMTDATIPVASKARFNRIQTEAARDPNFSYSPVQFILSYGETALYLSTMGDPITGVAPLEYVRSLFEEEKLPYELGWQPPKTTTTLASLGAMALQLNLASGEQVPEGVILGEKSLRAALIGLNAATGEIENNVVYAVAKLTGALGSLTGVLKGLTGS

SEQ ID NO: 2898 - protein, 675 aa, Aureobasidium pullulans
MLYSSLFVLALQSGLSIRGVQATQSSSHEKRALDTAAIAKKYFGNDAPWYQDRIAYFECSDTQIQDVFYYRQKIFRAHQRDLGAKGFISTEFLDDVGWQLQPYASLNDATGFHIGEGRWNRDRRFKDDYINYMLGGGDDRHFTDYIQDSVWGSYLVDNDVPSATKWIEQMKTLYNQWTDHFDTSKGLYYIEPLLDATEYTISSIDASGGQDGFTGGDAFRPSINSYMYANGRAIAKIASLAGQNDVATDYNNRATTLKNNVQKSLWNSTLSHFIDRYQVSNNYVKYWDPIRGRELVGIVPWTFNLPDNSTEYASSWKHILNANELGGPYGLRTVEPSYQYYMRQYRYEGTQRECQWNGPVWPFQTTQALLAMSNLLDHYQQSVVTNADYLRLLKQYAALHYQSSSTLNLQEDYDPATGKAIVGLARSPHYFHSGYIDLIMTGFVGIRPRADDFLEINPLITSDIKYFRAEQVPYHGTNIVVQWDADGSRYGQGAGLRIERDNVVIATSSTLKRLVIPFQKKAIIAINRPIAKSIQLQSSTSYPVGSASSGTDVENVHDAIDGRIWFFSEVVNGWNSDVNSATAQWYTVTFQSATQISRAEIAWFDNGNDFVAPTAYSIQVLSNGNWVDIGGQQKSAVVANGITNVQFTSTSVTQVRLAMTQPSAKRTRLVEVKYF

SEQ ID NO: 2899 - protein, 563 aa, Aureobasidium pullulans
MGAFSHLTAAAVLGLSVVVTAQNSSSSAALPIVDLGYARQQASSFNVTGGYYNFSNIRYAAPPIGDLRFAAPQAPAINRTQVQTGSVSRICPQANPAWNAIAAQFIPAYLLGQTNFTMSDFNLTTSSNTTAAPARDPRESEDCLFLDVMVPEGIFNSNEQHPVLVWIYGGGYTAGSKAGSGNPAGLLERSQADNSSGVIYVSMNYRLGAMGWLSGPTFQENATANAGLHDQRFALDWVQENIHLFGGDPKNVTVFGESAGGGSIMHQITAYGGNKGPVPFAGAVTQSPGFFPVVSPATQEGVYNDFLALLNVSTLAEARRLPSSAIIAANAKQVVAASYGQFVYGPAVDGDFVPALPGQLLARGQFDKNVSIMTGHNAAEGLLFTSPFINSDAALRDFLTMSFPALSYMPSTLNYITETLYPPIFDGSQAQNYTNQIGRSEAILSEVSFTCNAVWLNKAYNNETHAYLFNVPPSIHGQDIAYTYYNGNGSASSTVTNVPVAIAMQEYITEFAKTGNPNLRGAPFFPMYGSNATVLALGPRNIGPMRDPAASARCAWWQKGLFY

SEQ ID NO: 2900 - protein, 564 aa, Aureobasidium pullulans
MRSVLLTLTAVTAALAAPLDEKRAIGPSAVVKNGTVIGSTLGNVDSFKGIPFALPPTGSLRLKPPQSITAAYPSGTFAATGVPKACPQFFSQVDSSDIPSDVLGELLMSPLLQVATNTGEDCLTLNVQRPAGTTSSSKLPVVFWIFGGGFEVGSTQMYDGTPLVSESATLGHPVIYVAVNYRVGGFGWLAGKELQADGSTNLGLRDQRKGLEWVAENIAAFGGDPDKVTIWGESAGAISVYDQMIINGGDNTYNGKALFRGAIMNSGSIVPAVEVSHPKAQAVYDLVVNAAGCSGSSDTLECLRTIDYETFMRAADSVPGLFSYQSIALAYLPRPDPSSSFFPVSPEVANQNGNYAKVPMIAGDQEDEGPLFSLVQSNITTDAQLLDYVASAFPDTPRSVVAANVATYPNNPSAGSPFRTGIFNNIYPQYKRLAALFGDAVFNLRRRQLLYTASSVVPMWSYLDSHLYGTAVLGTFHGSDLLAIFFGTGGVTTQKTYLDYYTSFINYLDPNAIGSGAPLISWPQYNTTKPTLLQLQAVGNNLLPDTYRSASFQTLQANVGSFRT

SEQ ID NO: 2901 - protein, 407 aa, Aureobasidium pullulans
MRFLLISLLSALSVVTHALPAQQVPLLRHAANNRTVSPELFSDLEELARVVDISYCVGLTGIGISKPFKCLSRCSEFPEFELVKTWNTGQLMSDSCGYIALSHSQTNPRIIVAFRGTYSIANTVVDLSTVPQEYAPYPGDPDSDTTGDDEAGTPRCNNCTVHTGFYSSWKVASSAVLPDLEAAIAAYPDYALTLVGHSLGGAVAALAGLEFVSRGWNPTVTTFGEPRLGNTALNHYLDQRFNLLDSTREVWTDIVDERQLRYRRVTHVDDPVPLLPLTEWGYRMHAGEIYISKSALTPDVRDLQHCAGDEDHQCIAGQDGSLSTESILTKRSDLRAQVKRSIDDLTEEYELEKRDIGSWVVPSRYKLWQLFFSHRDYFWRLGLCVPGGDPWDWNRRPYAPLDDEDQH

SEQ ID NO: 2902 - protein, 101 aa, Aureobasidium pullulans
MKVFASILAIAAIASAAATPDVKRRSAVLASRDASDLCGPLDTPMCCGTDVLGLADLSCSSVPSDVTTTDDFTAYCGAEGLSSHCCVTSLLGSLGVACAAA

SEQ ID NO: 2903 - protein, 759 aa, Aureobasidium pullulans
MRSFFLLSAAAALTLASPVPQELDFDLVDVVETPSNVTIPTNTDELIVSYDSDAAAAAVQTSVLTGQTEIDISNSTTNSTSSSTLRRRGTCAVQASGSGPVPSPDTASAFLSYSAFASAASGAATPSGYTQAFKNLNASSNAYGYLGFTNLASYDTAKCAQKCNAISGCASFNLYYERDPSKDPGTGCENPASTTNIKCVFWGGDLTTTNANNAGQYRSSFQVVIAGSNGYVNNTIEPADGYTSPSYYGNTAIDAPVDCNGQSTFLGSKVFTGGPFDASLCAAACDAQSATNLKANKATCKFFNTYILARNNVAIGQYCNLYSQTWASSYATYKGSNSGGNKYTVSYSYGFSSSADAGTCKKPSTSTWIISSATATASSTATAQPTTAGGFINWKTFQANGANLGGWLEKEQTHDPIWWASVANLSTTPDEWTLCQTLGDQCGPTLEARYESFLNKSTIDQLASVGVNTLRIPTTYAAWVNVPGSALYHGNQQQYLKAITDYAINTYGMHIIVGLHSLPGGVNNLDIGEALMHDDFFYNTTNLNYAYAAVDSILDFIKASGNLTSWTIGPINEASDNLSGFGTSAGLSDKGAQWVADYINGVVARTAKVDSRIPVMVQDCFKGAAFWEPYFDASANLVIDSHVYYFAAAGTYSQYVAPAVCGQAAFIAEATKFPNFIGEWSLQTMYNNSLAISERQLIFNTQRYAWSKYVSGGSFWTAVSYSTALVDGQGTQRDYWSYTDLISAGVIKSESAFNGTAYC

SEQ ID NO: 2904 - protein, 564 aa, Aureobasidium pullulans
MHPSWSLLPLVASVASAAPSLLRRAPVGAPVVNLKNGSYYGVHNSQYNQDFFLGVPFAQPPIEQLRFANPETLNLSWTGALPATNYAFECIGYGGDQIGYQQSEDCLYLNVVRPSGYENQSLPMVVWIHGGGFYMGGAVDRRYNLTFLVENSVKIGKPIMAASIAYRLGPFGFLNGDEVAGAGQTNIGLKDQRLALHWLQENGAAFGADPKKVTIMGESAGAASVGFQLTAFNGRDDKLFRGAIMESGNPIAYGALNTSAEYQPKYAALTKAAGCGNATSTLDCLRALPLFVLNNILNTTEFNSRWNPALDGDFIARYGSEQLAEGAFVHVPIIDGANSDEGVSFSPNGINSTADLEVYLNTTSNTQWGLTPDLVDDLLRVYTSGAQDYLIPSTEELGQNVTSLGPAYGPYYRASAAYFGDEVFIANRRKTCETWAANNVSAYSYRFNAIPTGSDYVAHFQEVAFVFNNLEGLGYAIPPFANKSSAFTELSDFMSKSWVTFVHDLDPNGFDKGVNSSLPAWPVYSVDKPQNMVFDANVTSYAEPDTWRAEGIKLISDNNVQYHR

SEQ ID NO: 2905 - protein, 887 aa, Aureobasidium pullulans
MLFNIVTLLALAPSVLSAVTDNGAKRRNVVPGGYIVEFEDVMSIASDTKSSFYKSLSDKNMDPTHRMDLSSSLFKGLSFHVDTGLDQAVVAQDIQAMPLVRKVWPISLYDTQDFATAPYTNGSNSTSSSDTFSTHLMGHVDRLHAEGLTGNGTFVAVIDTGIDYLHPALGGCFGPGCKVAYGYDFVGDDYDGTNTPVPDSDPYSACNEHGTHVAGIVAAGPNPYNFTGVAPDATLGAYRVFGCSGSSGDDVLIDAFTRAYEDGADIITASIGGPNGWTEEPWTVVVSRIVAAGTPCTLAAGNDGSEGLFYGSSAADGIGVIAVGSIDNIESPVFTTYGTYRIDNSTTGEFGYLEAAIGMPNISLPLWAVSKDSAIVDDACEPLPADTPDLAGKLVLIRRGTCTFDTKAANVAAFGAQYIMFYNNAPSLTSASVSYPGILGAAMVSAEQGASWAASLATGSAIQVTITGDLTVFSSPPNNITGGHMSTFSMWNPTNEAYVKPEISAPGGNILSTLPLSQGGYGVLSGTSMATPFVAGVVALMTQARPGLDPYTIRAILGTTGHPVTFNDGRTTYDYLAPVVQQGGGEVDAFAAVHTSTVIDVANLAFNDTAHFVKEANFTITNRGTSEITYDFAYVNAATAYTLPDDGSTQPQTFPPDLVTSGASVSFSAGSVSVAAGKSETVLVTLALPQDLATARIPVYSGFITINGTNGDSLNLPYAGIASSLKDATVLDASTGYPYITSTSDNTYVPLDANTVFTISVANTTINGTTDNSTGLLIPNLRIGLVMPSSLIRADLIPSNITYGTYTNTTTVLGVKTLGAIAGTPSVYQPRANAWSTAFYGVLDDGRRVPAGTYSILVRALRIFGDATNPDDYDSAETVPFTIKYVH

SEQ ID NO: 2906 - protein, 482 aa, Aureobasidium pullulans
MKLLKTFTFLPLLCFGVEATEHHGTVELSLMNSVGNKYGDEYYVNLTVGTPGQLQSVLIDTGSSSTIFLASDVPGCNKPLCPQTFNLSASSSFDAVSPGALYAPFGGAAALGDFVTDVVQIGDLSISKVPLGLAHTFRSRLQPYTGILGLGYSSREAINRTMSHKVPKHPSFIEVLTKANAISSRLFSVHLNKLDMYGSILFGGIDTAKYEGPLTTLNCLNSKHDEVDQWYLNLQEVTMQPHDGPELTLLRSTQDEPRFALVDTGSPDWQLPSSAYHKVLGFAGAEAPDGLWPLPGFNRPCRQVAYGAANTTHFQLTFAGNGTNTATLDLELADLFTPITGDDGSATVDRYGQPLCMLRIVEVEENNEPLIISSSVMRAGYWVFDLDNGQISLGQSDLETTSSNVVQVQAGTDGLSRAVQRLVPESQLNDVEGQMALPSTYKLSTATNTIGYTTGAQFYPSSAARRSGENTMRLETQRRPTK

SEQ ID NO: 2907 - protein, 424 aa, Aureobasidium pullulans
MVLLTIASVLSLGLGRALAQSGVISPLARACPGYSNNTDVVCINRYASAMPPSFERQSSTGGVFSPNDTFVETQVPSDPSFGLVKNATFVVFDQRGSQILGPSPKLESVFASRNDSIHEGPVYVPSLDAIIFSLPHQGIYQQQIIHLNDSTPRLENYTTTPPVYAVNGGKLFNGKIYWAVEAGFSFPSPQNGSLVAQRPGIYELDPSTGEVTTLLNNYFGQAFNSPNDLWVDDQGDIWFTDSWYGYAINVTVYPVLRPATYRFRPSTGRVSIVEDSIAQPNGIGMSPDRRTMYISDTGVTDFENYPADSPLPRYSYNPLGRNSLYAFDVVASPVGSYIINKRPIYQAQTFGDDGFHVAQNGYLIAAEGGGVTVLSKYGEMLLRIETGFTVNNIQFAGPERKDLWVFGEGEIARVTWDLVGMANE

SEQ ID NO: 2908 - protein, 701 aa, Aureobasidium pullulans
MSQNRLTFSLQKLSMSRVSLVTLFLLSILPIISANPHAISVQLSAGAVSVGNGTTGRVMFILSPNGTDPLDDTDDTTTQDFFFGMNVNNLHHNDTIKLSGGTRDHTDTGVFGWPLETLNDIPVGNYRAQAFLKRYDTATRSDGSVVRLKFPCGDGSPPVSGVGDLASDIIDVHISGKAQTIKLLWNNTVPFLDFSGHEVGGCAQGNYEDTQYLKHIKIRSKKLSDFWGRDMFLGANVLLPHGYNAHDNATRYPVIYSQNHWAEGDGPDSYSTKVSFKEAWDSGVIPASGNKTSRETPKMILIAFRHETPYYDDSYAVNTANLGPYGDAINEELIPYLEARFNTIPKPYARIQDGGSTGGWESAANLIFRPDLFGACFSSYPDSLDFHKHQAIPLYNGTNAYKYPNGSDIPSIREFVNGTQQVLASTATENHWELTFGTSSRSSLQWDIWNAVFGIQGLNGYPLEPWNKVTGEIYPEAVKYWESMDLAHHIVTNWNSSLRLGEVLRDRVHISVGTWDDYFLNEGVAEFKSRVETLGGQDWATISILPEKTHGGFYRGMEAWDYLELVKRWVDDHAPDGATPLHANLTLGTSRGNTWSEVIGRGGHQAALARQSDPVIKVTGGIVGTVGSWDPGMKLVARWVINNKTSEKHGCTSFNVTQGDVVRYNTGNAKTNKKAEQVQLWVTGRKMGYVEETRKSNRLRI

SEQ ID NO: 2909 - protein, 1546 aa, Aureobasidium pullulans
MRQTFQIFVLLGFVANSFASSSSHFAPYASVLNHTSQLKKSYDYIVIGGGTSGLVVANRLTENPNITVLVIEYGYVDGQENGTTVPGLPVPSKYLRTDTSIPQPGLNNRTSPLYTGAVVGGGTVVNGMFFARGSAGDYDAWEQLGNPGWGWEGLLPYFKKSETFTPPTEELQDMFPGVISSDLSPHGIDGPVGSSFSNYQYPVIKNFFAGWNSIGVSTNPQPNNGKAIGAFYSTISAYAENQSRSTASDAYYRPIAGVRGNFHLLTGCLVAKVNFSKGRRAVGVDFISRETNKTSTVKAAREVILAAGAVRSPQILQLSGVGPRKLLESLGIECVVDLPGVGRNFQDQPTIYMQFSYGNYTFPTPDWMFSNASWAAEQLDIYNKNRTGPITIPYLGGSSVAFLPLKNITPSYPSILATTALTNLSSIFPSTIHPSILTGYKAQHDLLLSLYASPDAAVAEIAWEGGNTIPLAMIRPFSRGAIEITTTDPFHPPTIDFGTFSHPTDILTSIASIRKLREWISSPAMQALGAVETFPGASVSTDAEIEAAIRNAATSSWQHPSSSCAMMKKRWGGVVDAEVRVHGVKGLRVVDASVFPMAVAGHTSSSVYAVAEKAADIIKLSWETFLTTVYSTTTSVSLSISTQPASTFTTTQSLTLTATATATSLSLSLRPASTVVQISTTTAYSYITTTSYPVASTVTTTSYAPQTTVYAPPSTITVTVSNRGAATSSATPSFAFTTRDFCPAIDDQDIASSNGTPYTMHCASDTNIGSFADARAGYGYGDCLDACDRTPRCVAFTYVGSSSGQASGTCYMKDQVGLVQANAGSTIVGVKKVVSAPSSAAASSSSVAPPLQTAPVQEDYSCPENDRQRVIDNYGGVYTLACSSDTSGGGAFAGDSPDFNGCFEKCDSMVNCVGFTYDGNNCYLKTGAANSISFVPAASNFVGAIRNMPSDGNSYSVTPSSTPPQTTTVWFCKTEADILCEYTDNHAGDLSSHPSARDFVFDHNINCHLDCYAASSEHEHHNYDIHELCSNTVSSHNRLHNHFDDLCCNTLAADLDCLCCNTLAADLDCLCSDTLTADFDCLCGNTLAIHLDSLCSYSISLNSDHDLHSLCCNTISSHSHLNDHFDDFRLCSHPSSLNLNSDYHNSELVHSDTDDYCSSTASQYCDCDDHCSSAASQYCNCDEHNLWPNSSTNNFNSDLDYHKYYNSSGHCDIDTAGCDDHCARTSCQHCNNYCTSTSSKYCDGYGDTILYYERDSCKSSSARSNYWLPNNDTSAAPTVALSSPTTIISSAANHDDGIVARVVPFAISICGFSSNNLTISTNGVLGFGITSSYQPAALPQYTALSPTGYAVIPFWADLYIAQGTSQGIYYQVDGTAGSRIMTFEYYATYYNKTSNYYHFQILFYENNPKSFTFKYLNVTDNGVNAVVGYQCQPNSKFKQYSAKQAIITGGLQVDYSYSADTFTSGRVPSRVAMIGLMIDFVNRIVDNVSSSWRAATSWMRDNPSSTPSNEVYAPKPSVTFEANIEDSINRRWAGGYSRRENSSTLA

SEQ ID NO: 2910 - protein, 665 aa, Aureobasidium pullulans
MRLSTFLLLAAATAAVAQNTTQVYDYAIAGAGTAGLLLAIVLTEDPSINVAVLEAGSDGRTNPNITIPELRGEIIDTEYDWAYYSTVQPGLYENRSQAVNRGKTIGGTSAMNWMIHNEDSRIQLDIWESLLNLTSWNSDASLGWNWETLSTAFRESEVFFAPSSNASSAEQPDPTNHGSSGYICSTLQRSVLSLLSDYVTPALLNAGYAVPGDRNGGNVTGAGLLPLAICPGNYTRSYSGSAYTAVQDRRNLHLYTNAQVTNISWISTTTGNVTARGLNYVDTSGRTSNTSLSIQAQEIILSAGIAGSAPILERSGIGNPDILTPLNITPIVNLSSVGTGLRDPLMMQYQPLQYNFSVEFTGGEYAQNYIDLRPAQDVLSPADYNAASVWLNETTSIPGLEDAQLLVFKHLWFARQPLIEMAWQYSSTQSMPYTLIPLSQGTVHINTSDPLAAPVIDPNYNSVTAIINNETVPWDLWLLSRASQFYVTQLANSPPFSDVLTKTDPDHNLSPADYQQAVYERTGTSQHLTGGLPMLPRSAGGAIASDLLVYGTQNVRVVDGSIFPYQPSAHPMGLTYAVAVHAAKILQRARGTKLTYTELPGVSNSSSNATAVFPTNLPTATYDVRGSAVPASSSVVVSTGGVEKVETNGWVMGISMMVFGWNVLM

SEQ ID NO: 2911 - protein, 355 aa, Aureobasidium pullulans
MKVTLSQLIALATTASCTVIDLDKRASPLDVTLTPLGNTKVKAAVTNNGDVSYNLFYKGTFLDEAPVDKLHVTSAAAKAPFTGILQRLATTQLTEESFKPLMAGQTIEVEVELAELYELSTSGAYSVLAAGSVPYAELNSTVLSGSALSFSSNTLSVDVDAAEAAKVEFAVSKLEKRTAIQSDCTGTKLTAIRSALSNCNRLATAAATAATSGSASKFQEYFKTTSSTTRNTVAARLRAVASDCASTTGGKTRTYCTDIYGGCSSGVLAYTLPSNNYIAYCPLFFSDLPGLTGSCHAQDQATTVLHEETHAPGVYSPGTEDNGYGYSAATSLSSSRAVLNADSYALYANAIYSGC

SEQ ID NO: 2912 - protein, 757 aa, Aureobasidium pullulans
MRSFFLLSTAAALAFATPVPQQLDLSMADAIPTPENVTVPSDVSSQTVEFDIDAALEDAIVAVLTDDNTIDVSDSTADPVNGTTPIQKRAACSTVALGSGPTPSPDTAADFLKLASISTAANGASAPSGYTESFKNVKAAANAYGYLGFTTLTSYNVQSCADKCDKINGCNSINIYFERDPQTDPGNAECKNNNPASTTNIKCIFWGGPVTTENSVNAGQWRSKFQVVIAGANGYVKNSIATPTGYSSSAYYGAASIDAPKDCNGQSTFITSKVFTGSPFDARLCAAACDAQNIDHAKTGAQQCRYFNTYILSRNNVALGQYCNLFTQAWTASQATYKGITSGANKYTISYSFGVSASSDAGNCNKESSPPTSDTGKPPVTGPSTGADAFINWKTFKANGVNLGSWLEKEKNHDTFWWNSINDDPSIMDEWSLCASLGAQCGPVFEARYGSYVTKADIDKLGAVGVNTLRIPTTYAAWVKVPGSQLYSGQQKTYLKAITDYAIKTYGMHVIIGLHSLPGGINNLDIGEAFFHKEWFYNETNLAYSYQAIDGILDFIKASGNLTAWTIAPINEAGDDLSKFGGPNTLSTAAADWTGKYLNGCLDHIAKLDKRIPMMVQDSFMTPGAWYKYFDASANVVIDTHVYFFAVAGAYSQYTPGAVCGQAKWISNFDKFPNFVGEWSLQIRFNNTFSDRENNFNVQRFAFDKYASGGAFWNVHSHSAAAVSGEGTQRDYWSYVDLIDQGVVKTIDTSYAGCDAL

SEQ ID NO: 2913 - protein, 1580 aa, Aureobasidium pullulans
MPPTASRSRMGVLPLFALFSSALAQSIPGASYFTGGGVPGSGAYQLVDDYQPSVFFSKFNYYNSYDPTYGHVQYVNETVANRNGYTTTDDDNITISVDTTNKWPRGGPGRPAVRLISDNTYTHGLFILDLNHMPFGCGTWPAFWLLGPDWPRNGEIDIIEGIHTSTTNTISMHTDSNCTIAGSGQTGLFTSSNCDHAANDNSGCGSVANNTATPNNYGKALSDNNGGVYITEWTSAYVRVWFFPRNNIPSSVTSGSPNITQFGLPMANFQGSCNIDSHFANHSIIINTDFCGAWAGFTYSNYKECPLTTGLNGYDSCVDYVGNNPQAFLDAYWEINSLKVYQLPVNVDSSTVRTSTAPLTSSSPISASNSIINPGMGQSTSSLPLSVPYSGPLSSASSTSSSSATASATPIVCPLYGNRPWTDYKGVSYTISCGSDFTAQSLNQDGQTVDSFEACIELCDGVDGCSGVSHLGGNGAGTCVLKTGTGDLVYDGHTFAAVAISGKSSGSSTTLSTTSTGSIPSTPPKTATLRPTAQPSTCPEANNAVYVDENVINYNVYCSADTEIGSFNSTDIHGGGFTACFTICDVTPDCVGFTFVGASSGTCYFKNQFGGTLSAPSNFVVAFLAQGQTSGSSSLAPKTSSVVLSSVASVPSPYSSTISISTRSSVLSVGSSLVSSSLLASTTSVSSSPSSSLATSLSSSRSFASSSIRASSSRPLESLTSSSSTLQSSASLTSLTSSSVPSSASSSQWTTSSAIPQIVYYVAPPCPSTADNICNSDTPTTCSNARGANFNVGCGNSYTGTTIDSNDGINRFRIMKRVTEPSYTDCLDLCDDTDGCVGVNYKGDECTLFSQITGTISDPGNIAATLLPPVPVTSTEAATSTPTASALPTSSSASASLPSMSVTSSSVTSSTSFTAIPSASSLTCPASAGQNATDSNGTNYTIACGFSVQGGDLASPFRAVSVLDCLPSCDITAGCIGVAYDTSSSLCQLKSTFSGTRVPNANFIIAVRAGATDPGISSLSGATSSSTTSVLSSSSIIASSTAPVTITTSYSASATVTVVSTYITTGVPPSGSIATGSESTGSGSLCFTCFLTPTVITGGGSLESPPVKTGTGSGSVCSAPASGSVETTTVFTTETVTACPTPGMCPPEGFGWYGTLFGSNFSSFSVAPQSSFVSSSFTSISGSIGPVASAGSSIPPSTTKFGPSSAVPSGGASATPICPGSNGKLFTDSLGQVYEIGCERYVTDQTVSTTNVSSLASCIDACDMYNLMSFNAPSSCLGVSFFTTLSMDNCELKNGFINVTTPGVDSARLLSRSVGSGNGTSGTGGSGGNGDYGAGSAVGTFTATATSPDGSGAGNGAGGTGNGSGSGSGGTGSGGSGGSGGTGNGSGNGPNTLPGTQPNTLPGTGPGTGLGTGPGTGPGTGPGTGPGSTVYGVSTAVSTFVSNGQTVVSTYGVSTAISVVYQPTTQTVTTTSISISVSVSERTIVSTAPGETVSVGGGTGGGGNGGVVTITAGGGNYITVTQVVTSYAQPTKSSSSFTCRTYATNYLNGMHGRKLAKRRSVFDKHGMGSGPLAPMPGAVP

SEQ ID NO: 2914 - protein, 302 aa, Aureobasidium pullulans
MHFTSIFLGLAGLLACASAKPANTTAYKHFECGVDISRASAHFNQTIRAMHQGVFKAHSGTQIAGIVARAAAAQPIAVDVAFHVITTAAKEGTISQKMVDDQFAALNTAYAPTNIQFKRVATTYTTNDAWAVGAGSDATALKTALRNGTYATLNVYFLTDLAGSILGTCSLPSNIGPGTPDPSTYIGDGCMIQANTMPGGNIYGFNQGKTTVHEVGHWMGLLHTFEGYSCSGNGDFVADTPMQSTSTDGCPSKPAKDSCPQNVGVDPIHNYMDYSDDACYTNFTPGQTKRMAGMWAAYRANR

SEQ ID NO: 2915 - protein, 362 aa, Aureobasidium pullulans
MRFTTSNLAILGGAFSYATLAAAQNLSYGADNFYRSDNVTLWPVTFQTQYRTEVTANLFLPDFLDYNSTHPAIVVGHPMGAIKEQGGNLYAQKLAEQGFVTVAIDLPFWGGSEGEPRQLVAPDAYAEGFSAAVDFLGLRSYINRRQIGAIGICGSGGFVISAAKIDPRISAVATSTMYNMGNLNRNGLQHSVSVEQRKQVIANAAAQRWVEAEGGDYIYSEGAPFEINEDSDAVSLEFYDYYRTSRGLFTPASSFPNQTSDRIFSSNTRFINFYPFNDIETISPRPILFVTGDQAHSKEFSVDAYARAMEPKDLYWVPGAGHVDLYDRVDLIPFAKITDFFRTSLVGNSSVPTGNETVARRF

SEQ ID NO: 2916 - protein, 506 aa, Aureobasidium pullulans
MQFLTTFLLLCSTPIVLAQQYAGDVISANLPTTANAEVAFFKIDDPSGKNNNLTLINYYSHGTDGNRIVESKIQRAVIVLHGLLRDPWNYENDMLNALAMVQDTNVNRDSVAVMAPYFPNGNDKNLGYPWTDGLKAGQGSTSNAMVWSGSKWSAGANNQYPHNSRNTSSYYILDELVRYFDDKTLFPNMKQIVLAGHSLGGQMLQRYAAVGDKLDTESPVVLWIANGDSWAWLSDYRPLNIPDCPTYNDYREGFAQFVEYGMTYGANLVAQGLDAIKANFDSKQIAWARALQDFGDHASSCAPQTTGQDRNERFFFFMKWFQPSCPDPSGTNCDTVDLVDAPHDNGQMFHSAAGLARLFTDNFYGDNSRAYDFGYPRKQQGDDPFPDPSLVNTPGTSNYNTYAGGLTYQGCWTDQAPTTAQALSTLLYDNSNNTIEACTSGCADSGYKVAGMSDATKCWCGNEVSSASAILTVDMQCKSPCPGNTAQICGGIQRLSLFSSGYPTFV

SEQ ID NO: 2917 - protein, 435 aa, Aureobasidium pullulans
MKSSLVILSAAFGLAAAVPRHNHHAHHQHHQEMKRDDATATENVDVFVAGPTVVMYSLNGNIISENDVLEGIKNGTLVWANGAPSLADPSSSAVASTSSAVAAASTTFLTSTSSSYSSSSSSISFSTSTSVSSSKQSATSSAASSSATGLDTTFPDGEIDCSDFPSDYGAVSLNYLGLGGWTGIQSPGSGSSLLGLTNIETVTKSNCGGTNCCSEGMYCSYACPAGYQKAHWPTTQGLTGQSVGGLLCKNGKLHKTNPNYKTLCITGSSEVTVLVRNEMSTSAAVCRTDYPGTESETVPVTANPGSVANLTCPDATYYEWTGKTTSAQYYVNPAGVSAEDGCQWGSSANPWGNYAPLNLGVGYSNGAAWLAIFQNAPTTNEKLDFTITIEGDNMNGYCRYQNGQYCSGKNYDSCSSSSGCTVSVSSGTAYFVFSN

SEQ ID NO: 2918 - protein, 469 aa, Aureobasidium pullulans
MRLLEAAALVAFAPPIAARGNFDFRVSQPRRLVAIKEPSPNHVTSNTISLGRADSKSNSLSAGYLQAIRAGNHVDGIYSRLRNGTADLLSVGAGSVFLAPLDAGGETFYVVIDTGSSDTWLINSAFTCVDPTDSATIPEEDCAFGPTYSLTSTVSQIDNRNFNISYADGERLNGRMITEDLTFAGITVENQTMGLVTEASWYGDGASSGLLGLAYSTLTNQYNGNDPTADIRGVNIPYNPLFTSMYAQKLTAPLFSIALDRDIARSAQARGGVLAVGGIPNIPHGTAWASANISVVGIDATTGQPEYQFYSIRVDGWAISANWSADFDVKMTGNKRKVQLLGAPSRNSIVDSGTSLIYAPSAVAAAVAAAFSPAASISSQTGLYHVDCNARVPRFGVTVSAKTFFVNRLDLIIDTGYGFCVLGVQDNNGGMTILGDVFMRNVLTVFDVGAGQVRFSARELQLTNGTVTQ

SEQ ID NO: 2919 - protein, 533 aa, Aureobasidium pullulans
MRSSIFAGLVGVSAVGAVKPLVDVSYSKYQGVSLENGITQWLGVRFAAPPVGNLRFAAPQDPVKNKTTIVADTFGNTCLGTGSAASNTSSEDCLFMNIYAPSNATTGHPLPVYFFIQGGGFNTNSNPNYNGTGLIEASNHNIVVVNFNYRVGPYGFLASEEITKGGSTNNGLKDQIKALQWVQKNIRKFGGDPDHVVLGGASAGAASITLLLTAHNGRNDGLFHATAAESQSFAAVRSINESQFMYDNLVIRTGCVDSKDTLVCLRSLNATYLQSKNINTPFPGAQNPPLYMYGPTLDNDVVSDLTMSAYRKGNFIKLPAIYGDDTNEGTVFVPANTSSIGESNTFLKDQFPLLTTPQLKQINALYPNNASNVFPNSGAWWRQASDAYGELRYNCPGINVSDIYAATFSRKDIWNYHWDVIDPVAAAAGRGVTHTVEINAIWGPENTRGNAPVSYSTTNAAIVPVTQAYWTSFIRSFDPNTYRLKGSPMWEAWTQGQKQRLHFVTNATAMENVDAGQKARCEYLSSIALDIKQ

SEQ ID NO: 2920 - protein, 366 aa, Aureobasidium pullulans
MVNITRVNLLSLAASIPYAAELQAVVNSSVDHLSFISYNESFVTDILGLNVSQQLVGNYQDFQPFHEAGVYNIQTGKLYATSNWQGSLDNPINVTAIDIHGNNSIQSLHFDKLAEANGGSTFYPVGTPFNSSEGQQIVFCDEGDFINPAQLVLVDPSTNQTRVLINNFLGRNFTSINDVKQHPITGDLWFTDVPYGYWQYFRPAPVIKNQAYRFEPNTGVVQAVADDAIAPNGIEISPDFKHVYITDTAVHTFPNKDNLTMPSTIYRYDITPDGKRLQNKQLFAYSDIGLPDGIHCDTEGNVYAGCGDGVHVWNPEGVLLGVFAVDGGAANFAFVPGGMYVFNEHRLFKVTLQAEGREVKRDFGLY

SEQ ID NO: 2921 - protein, 175 aa, Aureobasidium pullulans
MVMMRSNSISSVSSLSSRCSTADPEPSMQIFIKNIAGDTFALEVPESTSIATLSSLLAIRTNLPAQDMRLVYAGKHLDSSSSTLSDYNIGRESTLHLALPLRGGAPKKIRCQFKDCKDAAQRIVGDCGFCNGHFCGKHRMLESHACTGLETCKEEEKQRNRERLEKERTVAIKGI

SEQ ID NO: 2922 - protein, 585 aa, Aureobasidium pullulans
MVVVNQCRALFLASCLSAAASAQNATLPIVDLGYELHQAAHFDSATNLYNFSNVRYAAPPVGDLRFAAPQVPAVNRSVVQRGDVGRICAQGSPDWFTAELSVVPDLLSGNSASINVSEATKTLQGLRAQTSAQVAANSSALLANQDPRVSEDCLFLDVFAPKDAFDLAGKGYGSPVMLYIHGGGFASGSKADTDPTSLLDQAKVDGEDIVFVTINYRLGAFGWLSGPEFQVSGGIANAGLHDQRLALEWVQKNIHLFGGDPNRVTIMGSSAGASSVLHQITAYGGKKSPAPFAQAILESPGFAPMPSAIQQQKTFDQYMSYLNVTSLTDARQLPSQALLAANSLSIALAPFGSFGYSIAVDGDFVPALPGQLLANGFYDKSIKNIMTGHALNEALGFTDPTTQNDTAFRKSVIGNFPSLAAYPDEVDYILNTLYPPIFDGSQAQNYTTQLLRASAFNSEVSLTCSNYYLNKAFANSSYGYEFAVPPSLHVASSASIFTPTNVLRGNTTSNIDWKSPLNDAQIAYAMQSYVTRFVATGNPNKDGIAEFGIYGGDNSVIVVNTTGIARARASVANERCEFWQKGLFY

SEQ ID NO: 2923 - protein, 543 aa, Aureobasidium pullulans
MRCLLSVISLSALFASCISASSPIVTVKNGTVQGHHSTEWNQDFFLGIPYAQPPVGDLRFRWPRPRNNSFDGVLDATRYGYSCYQYGSNFNLSEDCLTLNVVRPTGHENKTLPVLVWIYGGGLTLGSTADQQYNLSGIVEASTLTDNPFIAVSMNYRLGVWGFLNTPVVHAEGSSNAGLLDQRLALQWVQENIAPFGGDPRRVTVWGESAGAQSIGFHLTSYGGRNDNLFQAAILESGGPEGASLNTLPFYSAATDNLTRTVGCPRTWTSPSQLACLRNLSSAALFASNYTVVWNPIVDGDFLTDYPSSLLAQDKFIRVPLLTGANTDEGVSFSVQNLNTTTDVYNSLFYWRNYALSPPSIRELLQLYPNNPAIEPPYSNHANVTYPKYGTQWRRSAAIGGDLVMIAQRRRMAELYTKAGQKVYSYRFDTPLYNATVPGSVKHFDNVMFSFQNISGAMGPLPQYQSYRTLSSGIGKLYANFVGTHNPNGVNTTNGTGLPYWPQYNIDAPTNLVLNATASFSEPDTFRKQGISFINSIWRELLA

SEQ ID NO: 2924 - protein, 283 aa, Aureobasidium pullulans
MKFTIAATTLSFALASAFPQKNAQVAMPDDIHAWHPAGVNDLRGPCPMMNTLANHGFIPRNGGNITKQNAIRGLADGLNFDAALASLMWDQAIIANPEPNATFFTLEHLNQHNVLEHDASLSRMDAYYGNNHVFNPEAFATSTRYWTDETLTANMLANSKLARMIESRAFNPNYTFTANNEQFSLGEVAAPFIAFGNTTSVTVPRDLVLYFFEHERLPHELGWSKKNETMTLKDILNVVSSIRNATSLLTPESASNQTADGESHGIPEGAQVARRSLHLPGGV

SEQ ID NO: 2925 - protein, 606 aa, Aureobasidium pullulans
MPSFSTLVGAFLGVASLAASAAVPVSQPFEHVKAKRQSTNATSSSGLEVDLGYEVYEGYSNQTTGINIWRGIRFAAPPTGSLRWQAPQVPAENRSQTIQANAFAPQCPQSSFNAYGRTGASMLSDEDCLFLNVYAPENATNLPVLVWIHGGGYGLGNGQQDMQAIINTNNNSFIAVAIQYRLGAFGFLSSDEVDRFGSVNAGILDQTFALQWVQSYISSFGGDPRSVTISGESAGGGAVMLQTMAYGGTLGTSLFKNAIAASPYLPMQYGYKDWVPSQSYYAFAGLANCMPNTPYGSSSRTIFECLVNQDTDTLQYASFNVSTTGTFGTWGFLPVTDGVFIQDVPSQQLLEKKVNGQNLLVGNNANEGPLFVPQDIDTEADLVAWLELTFPLFSNDDIARILRYYPSSNATDSPSAVDFATTGDSGPTAINVSSVATGQQQRANNIYAETTFVCPSYWMAESYTGGDRTSFRYQYSVPAAQHGADVSGYFGPAAPTQGPAFEAAFMSIWGQFVINDNPSIPTNVAGEGGQAAVNFPQFNVWNPLQVNLNQTGGQEVSSNIVQGVNATVYVGPGLSNEFEVVNAYDWEGGRGQRCDFWRAVAKIVPE

SEQ ID NO: 2926 - protein, 518 aa, Aureobasidium pullulans
MHVTSLLTVASLSAGSLAWPKYVSQQDDMSVQTSSGLIHGIKDSKYPNVRQFLGIPFAQPPTGSLRFEPPQALPASAAKKVVNNTQLPPSCMQYLNTESPGVYVDQILEFGLQGLNRTGSISEDCLTLSVWTPTGNNNQSCRSSELLPVEIWIYGGGFSTGGQDVPYQIPSQWVERTQDHIVVSINYRVNIFGFPNAAGLSDQNVGLLDQRAAVEWVRDNIVRFGGDPSRMLLWGQSAGSISVDYYNYAYPKDPIVSAFSMDSGTAFSVIQSVDTQHTNFTFVASQLGCANSSSPEAELACIRKVSAKDIEDFVANYQINGTSPGISFLPIPDEKVVFSNYTSRALAGNQANIPAIIGTNAQDGVPFAPYSSSGPNATLAQLALLRTFFCPATESIRLRQLTNRPTYRYVYSGNFSNIAPAPWLGAYHSSELPLLFGTYDNFRGAGPALEGQTSVAMQDAWVAFTKDGMQGIESTGWQEYEVLGENTVRDFGDGVAVKDTDLKYLEGLCDGSMPNYSA

SEQ ID NO: 2927 - protein, 674 aa, Aureobasidium pullulans
MKVLSTIAVCAASANAFEWTWPKVSDEPIYPPNGYNMPTKGPVDNSTYEYIVVGSGPGGSPLAARLALAGHSVLLIDAGEDHGTDRQVQVPALHPYASEYNPIRWDFFVDHYADEEQAKRDSKMSYLTPSGEYYSGLNPPEGSVRKGVLYPRTGALGGCAQHNALTMILPTENDWNNIATLTGDDSWMAKNMRKYFERLERNRYVPSSFVGHGFSGWLETRVTPVLLIAEDLKVLSLVTAAATAMGKGLIGGLLHTVTGLAEILTLDINNPTKSRDSAELIYQIPLSMDGDYVRSSPRDFVLQVAGATNKDGSKKYKLDVALNTLVTKVNFDTSNTKPKATGVDYLFGQSLYRADPRAGTDDGGEAGTVHASREVIVSGGAFNTPQILKLSGVGPAQELHSHGIPVVKDLPGVGGNMQDRYEVGVVGKAPSEFSLLKKCEFLNGTDPCYDNWKNNIGALKGGYTTNGIAFGFLHHSSVSESDPDLFLGGVPAYFNGYFPGYSVHATQDLSIWTWLTLKAHSRNNAGTVNLTSSNPRDTPKIVFRSLGEGVGGDKDLQAVYEGVQHGIKAFKDLIPLDGKFDRVWPPPEMISEEDLKQFIKDEAWGHHASCTAPIGADDDPMAVLDSEFRVRGVHGLRVVDASIFPKIPGMYIALPIYMVSEKAAEVIINSAASS

SEQ ID NO: 2928 - protein, 519 aa, Aureobasidium pullulans
MKTVTLLAVAFASVSCVSALSSKISLDYATYQGTAGFDGITRFLGMQYAAPPVGDLRWKAPQDPAQTTAGQSAAKFKDVCIGVKQTVGTGPIGGFTYGEDCLYISVITPSSATNTSHLPVLFHIPGGGFAQLADPNLDFTDFVKTSGNNIVAVQINYRVGGLGFLAGEEFGGDPNRVTIFGGSAGAGSVGLQMTAYGGRDDGLFAGAYADAPAYSEVNSDSYSQFQFNNFATAAGCGSATDRLSCLRQADIAKIQKANVVGNYTDIAAQFTFNPVIDGTFVQDIPLRLFQTGHFVNVPMIVGDATDEGTLFAANAGSPEEVSEFMQANVPSLTEANLTTINQFYPLMAAQQPFHKAYFPSAAAAFGEATFICPGLTISSAVGASNQVWNYRFDQSSLALRLAGYGVLHAFDTGAIFGPNAGPMAGLLGIVENGLVFSSFAGENANVVPIMMNYAISFVRTQDPNTYKSVFSPNWQTYNNNGGKQRIVVRNSGVIYEDVPAAQQTRCAFWTDIIANSFAE

SEQ ID NO: 2929 - protein, 569 aa, Aureobasidium pullulans
MFAKVALVLTAALSLVDAQFNNPTGVDIWCGKAYRDTNASFNPGGWFQEPSKSDTPFVDFKIKPRMNLYLEDDTISSFIVDAPVSWYVGHALPGGNTSTSRQGSKIVLNIVTGNRSLHLNQTSIKLGSTNNEIPFDLSSFSARSEPHNITVTGTLDGHKNVTFTATTQLNRLPLRSDNGTATRLDNLYGGLSVRKGQAKEWTSLFPYTYYVQWSLYWYANLTTLDEFAAMGYNVIHIVPTGDLGDTPFPWDKFQPYLDRADELGLYFMYDVRWDYANLTTMIDQIHHLHTHPSILLWYTADEPDGKSNPINSTAIAYNTIKAIDPYHPVSLALNCRDFYYADYAAGAEIVLEDVYPISTNTSYSAVYDTPCNATYGCCGCDDCSGSFTDISDRLDEYTAKDNLLGWQKIHWAAPQAFGNETFWTRYPTAAEEVVMNMLSINHAAKGIVMWDFPTKAEILEVTNKLAAVLTDEKVAKFLIGAPLTQKLKVAGAENIDAAAWTKDGEVLVSIVNLDYGNTPSNVTVTLPEGMKVAHMEEGLWGNASWSVHGEKLSTNSVMGLEVSLLLLKT

SEQ ID NO: 2930 - protein, 563 aa, Aureobasidium pullulans
MKVLASGFLLLNTASAAATKRYNAYHGAAVPTVQVKNGTYTGYHAPVYNTDNFLGMPYAQPPIGDLRFRVPQSLDSTWSGSKNATEYSPECIGYGRDTWSQGNYVSEDCLTLNVIKPTGSCESLPVLVWIHGGGLVMGGSGDRRYNQSFIVQQSVEAGMPIIAVSINYRLSSWGFLYGREIQESGNTMNGFRDQRLALRWVQENVAAFGGDPDRVTIQGESSGGTSVGAQLLAYNGRDDGLFHGAIAQSGAPISPGVDFDVDDWEPIIANISRATGCNGTGSVLDCLRKIPTDQLNSVINSTVTRGARYGPVVDGDWFTQTASQALSNGDFLKVPYIIGVNEAEGVVFGPRQVNTTQEILDYIVDSAIGVPSTLHGRPNSTIGLQFKRSSAIAQDMSMNAARRLTSHWWARHGARSYTYIFNALVNGLSYFSGAVHFQEVAFVFYNTEGLGYPQNGNPNPLGGPESESLVTLAKQMCRMWISFVNYGDPNMHLGLKAEPWNPVDAEEPEFYYFQQNETSKSLPDIVRAEGVSYWEELIMARKGTDCTGIVACGGSYDGDLNNL

SEQ ID NO: 2931 - protein, 346 aa, Aureobasidium pullulans
MKITTAGIATFGIPLLQRATAQNMSYGANNFYRSDNVTIWPITFPTIYHTTIAANLFLPDTLDRSTNHSAIIVSHPMGAVKEQSANLYATKMAEQGFIAVSIDLPSYGGSQGLPLNNVNPDMYAEAISAAVDYLGLQSYVDRRRIGAIGICGSGSFVISAAKIDPRIAAVATSSMYDMGAVNRDGLEHSQNLQQRKELIAQAAEQRWIEAAGGEVEYNLGTPLRLTNSSTAVDAEFYDFYRTSRGEVTPPGSGPNITTARTTTSNAKFMNFYPFNDIETISPRPMLFMAGDIAHSREFSADAYARAAEPKEIIWVPGAGHADLYDRVDLIPFSRLFEFFRTSLPSQ

SEQ ID NO: 2932 - protein, 260 aa, Aureobasidium pullulans
MPSTLFPGVALITGASSGIGKATATSFAQEGCTRIALADISEASLTTTQESLTKSYPDTQFLAIPTDISSPEAVRNLFRKAVEKFGRIDYAVNCAGVLGAAKKSHEMTLEEFDHIVNVDYRGSWLCSREELEVMVNQEPLETHDGRKGSRGAIVNVASQLGIVARPQAPAYCSAKAAIIGLTKSDALDYSEHNIRVNCVCPGVVETPLINDEVRKAISIAPMNRAGTPTEIADCILFLCSPKSSFVQGAALVADGGYTIN

SEQ ID NO: 2933 - protein, 542 aa, Aureobasidium pullulans
MLSVICLLLGLDLVSSTPLASKHARSSTVHLGYATYQGAALDTGVTQYLGMRYASSPTGELRWRAPQDPPTIHRVQNATQFGALCVGIGESVNINRTEDCLFINVYTPNNATRSSKLPVWVYIPGGGYAKETNSNYNATEVIRASGQNVVFVNFNYRVSAYGFLASKKVREDGDLNVGLLDQRKALYWVKKYIAQFGGDPNHVVIHGVSAGAGSVGTHLIAYGGRDDKLFVGAIGQAPFFPCQNDISQSEWQFDRFASAVGCSNVSNQLACLRAQNLSTLQAANIPSPFPGQTITPLFYYLPVIDGDLIQEAPILQFERGKHIKVPLLVGDTTNEGSAFAANVSTPAEVSSFLAANCPRLPASALEEANKLYPLMSPLPRHAVYFPSASAATGESTFICPGLLMSESLSRGQHSKVWNYRFDVSTVEETAAGLGVPHTFDTPAIFGPHYQGPAVAASLSVQPFTTYNAPIVPIEMNYYISFVRTLNPNTFRAKDAPIWEPFEGKNGQQRLLFEINGTTMEAVPKAQQERCDFWYSLAEIDGE

SEQ ID NO: 2934 - protein, 96 aa, Aureobasidium pullulans
MLAATIITAFIGSSIVAAAPADVSARQLTICSGTYSNAQCCATDVLGLADLNCANPPTTPTSQEDFIDICATEGQQARCCALPILGQALLCGSPLG

SEQ ID NO: 2935 - DNA, 52 bp, Artificial Sequence
  Synthetic
  misc_feature (51)..(51): n is A, C, or G
  misc_feature (52)..(52): n is a, c, g, or t
gagagagagagagagagagaactagtctcgagttttttttttttttttttnn

SEQ ID NO: 2936 - DNA, 9053 bp, Artificial Sequence
  Synthetic
  misc_feature (718)..(718): n is a, c, g, or t
  misc_feature (926)..(926): n is a, c, g, or t
  misc_feature (1017)..(1017): n is a, c, g, or t
gtgaggccagcgattggccacctctccaaggcacagggccattctgcagcgctggtggattcatcgcaatttcccccggcccggcccgacaccgctataggctggttctcccacaccatcggagattcgtcgcctaatgtctcgtccgttcacaagctgaagagcttgaagtggcgagatgtctctgcaggaattcaagctagatgctaagcgatattgcatggcaatatgtgttgatgcatgtgcttcttccttcagcttcccctcgtgcagatgaggtttggctataaattgaagtggttggtcggggttccgtgaggggctgaagtgcttcctcccttttagacgcaactgagagcctgagcttcatccccagcaacaaaacaccggcgccgtccgtcgccgtccttcaccgccggtccgacggcggcccacgggtcccaggagcttgagatccacttaacgttactgaaatcatcaaacagcttgacgaatctggatataagatcgttggtgtcgatgtcagctccggagttgagacaaatggtgttcaggatctcgataagatacgttcatttgtccaagcagcaaagagtgccttctagtgatttaatagctccatgtcaacaagaataaaacgcgttttcgggtttacctcttccagatacagctcatctgcaatgcattaatgcattgactgcaacctagtaacgccttncaggctccggcgaagagaagaatagcttagcagagctattttcattttcgggagacgagatcaagcagatcaacggtcgtcaagagacctacgagactgaggaatccgctcttggctccacgcgactatatatttgtctctaattgtactttgacatgctcctcttctttactctgatagcttgactatgaaaattccgtcaccagcncctgggttcgcaaagataattgcatgtttcttccttgaactctcaagcctacaggacacacattcatcgtaggtataaacctcgaaatcanttcctactaagatggtatacaatagtaaccatgcatggttgcctagtgaatgctccgtaacacccaatacgccggcccgcttccagacagctctggcggctctgaggtgcagtggatgattattaatccgggaccggccgcccctccgccccgaagtggaaaggctggtgtgcccctcgttgaccaagaatctattgcatcatcggagaatatggagcttcatcgaatcaccggcagtaagcgaaggagaatgtgaagccaggggtgtatagccgtcggcgaaatagcatgccattaacctaggtacagaagtccaattgcttccgatctggtaaaagattcacgagatagtaccttctccgaagtaggtagagcgagtacccggcgcgtaagctccctaattggcccatccggcatctgtagggcgtccaaatatcgtgcctctcctgctttgcccggtgtatgaaaccggaaaggccgctcaggagctggccagcggcgcagaccgggaacacaagctggcagtcgacccatccggtgctctgcactcgacctgctgaggtccctcagtccctggtaggcagctttgccccgtctgtccgcccggtgtgtcggcggggttgacaaggtcgttgcgtcagtccaacatttgttgccatattttcctgctctccccaccagctgctcttttcttttctctttcttttcccatcttcagtatattcatcttcccatccaagaacctttatttcccctaagtaagtactttgctacatccatactccatccttcccatcccttattcctttgaacctttcagttcgagctttcccacttcatcgcagcttgactaacagctaccccgcttgagcagacatcaccatggccaagttgaccagtgccgttccggtgctcaccgcgcgcgacgtcgccggagcggtcgagttctggaccgaccggctcgggttctcccgggacttcgtggaggacgacttcgccggtgtggtccgggacgacgtgaccctgttcatcagcgcggtccaggaccaggtggtgccggacaacaccctggcctgggtgtgggtgcgcggcctggacgagctgtacgccgagtggtcggaggtcgtgtccacgaacttccgggacgcctccgggccggccatgaccgagatcggcgagcagccgtgggggcgggagttcgccctgcgcgacccggccggcaactgcgtgcacttcgtggccgaggagcaggactgaggatccttaattaacaatcaatccatttcgctatagttaaaggatggggatgagggcaattggttatatgatcatgtatgtagtgggtgtgcataatagtagtgaaatggaagccaagtcatgtgattgtaatcgaccgacggaattgaggataaccggaaatacagacaccgtgaaagccatggtctttccttcgtgtagaagaccagacagacagtccctgatttacccttgcacaaagcactagaaaattagcattccatccttctctgcttgctctgcttacatcactgtcattcaatgcatagccatgagctcatcttagatccaagcacgtacttccatagccgaggtccacagtggagcagcaacattccccatcattgctttccccaggggcctcccaacgactaaatcaagagtatatctctaccgtccaatagatcgtcttcgcttcaaaatctttgacaactccaagagggtccccatccatcaaacccagttcaataatagccgagatgcatggtggagtcaattaggcagtattgctggaatgtcggggccagttggcccggtggtcattggccgcctgtgatgccatctgccactaaatccgatcattgatccaccgcccacgaggcgcgtctttgctttttgcgcggcgtccaggttcaactctctctgcagctccagtccaacgctgactgactagtttacctactggtctgatcggctccatcagagctatggcgttatcccgtgccgttgctgcgcaatcgctatcttgatcgcaaccttgaactcactcttgttttaatagtgatcttggtgacggagtgtcggtgagtgacaaccaacatcgtgcaagggagattgatacggaattgtcgctcccatcatgatgttcttgccggctttgttggccctattcgtgggatgcgatgccctcgctgtgcagcagcaggtactgctggatgaggagccatcggtctctgcacgcaaacccaacttcctcttcattctcacggatgatcaggatctccggatcaatactccggcgtatatgccgtatacgcaggcgagaatcaaggaaaagggtaccgagttcttgaaccatttcgtcactaccgcgctttgctgtccgtcgcgcgtgagtctttggacgggaagacaggctcataatactaatgtgacggatgtgaacccgccttatggtatggacactgcttcgatcggtcttgattcttcagcgtggttacaattgctaatgcggcataggcggataccccaaattcgtcgctcaaggcttcaacgaaaacttcctccccgtttggctgcagtccgccggttacaatacctactacacggggaagctgttcaactcgcacagtgtcgctacctataacgcgccctttgtgaacggtttcaatggctccgacttcctcctcgacccccacacatattcctactggaatgcgacataccagcgaaaccatgagcctccgcggagttacgagggacaatatactacggatgtgatgaaggagaaggcatcgggattgttggcagatgcgctggacagtgacgcgccattcttcctgacggtcgcgccgatcgcaccgcacacgaacatcgatgtggaggggctgagcggtgcgggtggaccgaagatgacagagccgctgcctgcaccgagacatgcgcatttgtttgctgatgcaaaggtgccgcggacgcctaatttcaatccggacaaggtgtgtgataacctgacacagtggtggggacgggcactgacaagagtaggattctggtgcggggttgatccaaaccatggaactacagaaccagaccgtcatcgactacgaagaccatctttatcgccagcgtctgcgcactttgcaagccgtcgatgagatggtggatgcgctgatcacgcagctggaagaaagtgggcagatcgacaatacctacatcatttacagtgctgataacggctaccacattggccatcaccgtctaccccccggcaagacaactggctatgaagaggacattcgcgtaccattctacattcgcggacctggcattcctgagggaaagagcgttgaccgtgtaaccacgcacattgacattgcacctacactgttcgagttggctggggttcccttgcgagaggactttgacgggactccgatgcccgtgtcgactagcaagaagacccagtcaatcttgcatgagcatgtcacagtcgaatagtggggtcacgcggtgcttgagggcgaatacggctccatcggtgagtaacctctctcttactaccacggaaacatcactgacgtaaccaggacgcggccgcaagctttccctatagtgagtcgtattagagcttggcgtaatcatggtcatagctgtttcctgtgtgaaattgttatccgctcacaattccacacaacatacgagccggaagcataaagtgtaaagcctggggtgcctaatgagtgagctaactcacattaattgcgttgcgctcactgcccgctttccagtcgggaaacctgtcgtgccagctgcattaatgaatcggccaacgcgcggggagaggcggtttgcgtattgggcgctcttccgcttcctcgctcactgactcgctgcgctcggtcgttcggctgcggcgagcggtatcagctcactcaaaggcggtaatacggttatccacagaatcaggggataacgcaggaaagaacatgtgagcaaaaggccagcaaaaggccaggaaccgtaaaaaggccgcgttgctggcgtttttccataggctccgcccccctgacgagcatcacaaaaatcgacgctcaagtcagaggtggcgaaacccgacaggactataaagataccaggcgtttccccctggaagctccctcgtgcgctctcctgttccgaccctgccgcttaccggatacctgtccgcctttctcccttcgggaagcgtggcgctttctcaatgctcacgctgtaggtatctcagttcggtgtaggtcgttcgctccaagctgggctgtgtgcacgaaccccccgttcagcccgaccgctgcgccttatccggtaactatcgtcttgagtccaacccggtaagacacgacttatcgccactggcagcagccactggtaacaggattagcagagcgaggtatgtaggcggtgctacagagttcttgaagtggtggcctaactacggctacactagaaggacagtatttggtatctgcgctctgctgaagccagttaccttcggaaaaagagttggtagctcttgatccggcaaacaaaccaccgctggtagcggtggtttttttgtttgcaagcagcagattacgcgcagaaaaaaaggatctcaagaagatcctttgatcttttctacggggtctgacgctcagtggaacgaaaactcacgttaagggattttggtcatgagattatcaaaaaggatcttcacctagatccttttaaattaaaaatgaagttttaaatcaatctaaagtatatatgagtaaacttggtctgacagttaccaatgcttaatcagtgaggcacctatctcagcgatctgtctatttcgttcatccatagttgcctgactccccgtcgtgtagataactacgatacgggagggcttaccatctggccccagtgctgcaatgataccgcgagacccacgctcaccggctccagatttatcagcaataaaccagccagccggaagggccgagcgcagaagtggtcctgcaactttatccgcctccatccagtctattaattgttgccgggaagctagagtaagtagttcgccagttaatagtttgcgcaacgttgttgccattgctacaggcatcgtggtgtcacgctcgtcgtttggtatggcttcattcagctccggttcccaacgatcaaggcgagttacatgatcccccatgttgtgcaaaaaagcggttagctccttcggtcctccgatcgttgtcagaagtaagttggccgcagtgttatcactcatggttatggcagcactgcataattctcttactgtcatgccatccgtaagatgcttttctgtgactggtgagtactcaaccaagtcattctgagaatagtgtatgcggcgaccgagttgctcttgcccggcgtcaatacgggataataccgcgccacatagcagaactttaaaagtgctcatcattggaaaacgttcttcggggcgaaaactctcaaggatcttaccgctgttgagatccagttcgatgtaacccactcgtgcacccaactgatcttcagcatcttttactttcaccagcgtttctgggtgagcaaaaacaggaaggcaaaatgccgcaaaaaagggaataagggcgacacggaaatgttgaatactcatactcttcctttttcaatattattgaagcatttatcagggttattgtctcatgagcggatacatatttgaatgtatttagaaaaataaacaaataggggttccgcgcacatttccccgaaaagtgccacctgacgcgccctgtagcggcgcattaagcgcggcgggtgtggtggttacgcgcagcgtgaccgctacacttgccagcgccctagcgcccgctcctttcgctttcttcccttcctttctcgccacgttcgccggctttccccgtcaagctctaaatcgggggctccctttagggttccgatttagtgctttacggcacctcgaccccaaaaaacttgattagggtgatggttcacgtagtgggccatcgccctgatagacggtttttcgccctttgacgttggagtccacgttctttaatagtggactcttgttccaaactggaacaacactcaaccctatctcggtctattcttttgatttataagggattttgccgatttcggcctattggttaaaaaatgagctgatttaacaaaaatttaacgcgaattttaacaaaatattaacgtttacaatttcccattcgccattcaggctgcgcaactgttgggaagggcgatcggtgcgggcctcttcgctattacgccagctggcgaaagggggatgtgctgcaaggcgattaagttgggtaacgccagggttttcccagtcacgacgttgtaaaacgacggccagtgaatttgcggccgctcgaggattgcctgaacattgacattcggcgtccggccgggaccaccgcggactcgaagctgcctgtgctggtctggatctttggcggaggctttgaacttggttcaaaggcgatgtatgatggtacaacgatggtatcatcgtcgatagacaagaacatgcctatcgtgtttgtagcaatgaattatcgcgtgggaggtttcgggttcttgcccggaaaggagatcctggaggacgggtccgcgaacctagggctcctggaccaacgccttgccctgcagtgggttgccgacaacatcgaggcctttggtggagacccggacaaggtgacgatttggggagaatcagcaggagccatttccgtttttgatcagatgatcttgtacgacggaaacatcacttacaaggataagcccttgttccggggggccatcatggactccggtagtgttgttcccgcagaccccgtcgatggggtcaagggacagcaagtatatgatgcggtagtggaatctgcaggctgttcctcttctaacgacaccctagcttgtctgcgtgaactagactacaccgacttcctcaatgcggcaaactccgtgccaggcattttaagctaccattctgtggcgttatcatatgtgcctcgaccggacgggacggcgttgtcggcatcaccggacgttttgggcaaagcagggaaatatgctcgggtcccgttcatcgtgggcgaccaagaggatgaggggaccttattcgccttgtttcagtccaacattacgacgatcgacgaggtggtcgactacctggcctcatacttcttctatgacgctagccgagagcagcttgaagaactagtggccctgtacccagacaccaccacgtacgggtctccgttcaggacaggcgcggccaacaactggtatccgcaatttaagcgattggccgccattctcggcgacttggtcttcaccattacccggcgggcattcctctcgtatgcagaggaaatctcccctgatcttccgaactggtcgtacctggcgacctatgactatggcaccccagttctggggaccttccacggaagtgacctgctgcaggtgttctatgggatcaagccaaactatgcagctagttctagccacacgtactatctgagctttgtgtatacgctggatccgaactccaaccggggggagtacattgagtggccgcagtggaaggaatcgcggcagttgatgaatttcggagcgaacgacgccagtctccttacggatgatttccgcaacgggacatatgagttcatcctgcagaataccgcggcgttccacatctgatgccattggcggaggggtccggacggtcaggaacttagccttatgagatgaatgatggacgtgtctggcctcggaaaaggatatatggggatcatgatagtactagccatattaatgaagggcatataccacgcgttggacctgcgttatagcttcccgttagttatagtaccatcgttataccagccaatcaagtcaccacgcacgaccggggacggcgaatccccgggaattgaaagaaattgcatcccaggcca

SEQ ID NO: 2937 - DNA, 32 bp, Artificial Sequence
  Synthetic
gtccgtcgccgtccttcaccgccggtccgacg

SEQ ID NO: 2938 - DNA, 28 bp, Artificial Sequence
  Synthetic
gcggccggcgtattgggtgttacggagc

SEQ ID NO: 2939 - DNA, 34 bp, Artificial Sequence
  Synthetic
cacccaatacgccggccgcgcttccagacagctc

SEQ ID NO: 2940 - DNA, 44 bp, Artificial Sequence
  Synthetic
ggtgttttgttgctggggatgaagctcaggctctcagttgcgtc

SEQ ID NO: 2941 - DNA, 27 bp, Artificial Sequence
  Synthetic
ccccagcaacaaaacacctcagcaatg

SEQ ID NO: 2942 - DNA, 21 bp, Artificial Sequence
  Synthetic
gaaggacggcgacggacttca

SEQ ID NO: 2943 - DNA, 21 bp, Artificial Sequence
  Synthetic
gtccgtcgccgtccttcaccg

SEQ ID NO: 2944 - DNA, 25 bp, Artificial Sequence
  Synthetic
ggtgttttgttgctggggatgaagc

SEQ ID NO: 2945 - DNA, 27 bp, Artificial Sequence
  Synthetic
caccggcgccgtccgtcgccgtccttc

SEQ ID NO: 2946 - DNA, 29 bp, Artificial Sequence
  Synthetic
acggcgccggtgttttgttgctggggatg
